(19) United States
(12) Patent Application Publication
(10) Pub. No.: US 2014/0018252 A1
(43) Pub. Date: Jan. 16, 2014

(54) GENE ARRAY TECHNIQUE FOR PREDICTING RESPONSE IN INFLAMMATORY BOWEL DISEASES

(71) Applicant: Children's Hospital Medical Center, Cincinnati, OH (US)

(72) Inventors: Huan Xu, Cincinnati, OH (US); Lee A. Denson, Wyoming, OH (US); Bruce Aronow, Cincinnati, OH (US)

(73) Assignee: Children's Hospital Medical Center, Cincinnati, OH (US)

(21) Appl. No.: 13/857,351

(22) Filed: Apr. 5, 2013

Related U.S. Application Data
(63) Continuation of application No. 12/445,764, filed on Jun. 16, 2010, now abandoned.
(60) Provisional application No. 60/852,364, filed on Oct. 17, 2006.

(51) Int. Cl. C12Q 1/68

(52) U.S. Cl. CPC C12Q 1/6883
USPC 506/9; 435/6.12; 506/16

(57) ABSTRACT

Disclosed are methods for classifying individuals having or suspected of having an inflammatory bowel disease, such as Crohn's Disease or Ulcerative Colitis, as ‘responders’ or ‘non-responders’ to first-line treatment, generally comprising the steps of a) obtaining a biological sample from the individual, b) isolating mRNA from the biological sample c) determining a gene expression profile from the biological sample; and d) comparing the gene expression profile of the individual to a reference gene expression profile or other suitable control such that changes in expression can be used to stratify individuals and predict efficacy of first-line therapy. A gene expression system is further provided for carrying out these methods.

### BACKGROUND OF THE INVENTION

[0001] Inflammatory Bowel Disease or “IBD” is a collective term used to describe diseases including Crohn's disease (CD), ulcerative colitis (UC), microscopic colitis, and indeterminate colitis. Most IBD can be categorized as either CD or UC. With current diagnostic approaches, approximately 60% of IBD patients are classified as CD, 30% as UC, and 10% as indeterminate colitis (IC). The occurrence of IBD is estimated to be as high as up to approximately 2,000,000 Americans, at a cost of greater than $2 billion dollars annually.

[0002] CD is characterized by discontinuous transmural inflammation that can involve any part of the gastrointestinal (GI) tract, although the terminal ileum and proximal colon are most commonly involved. This inflammation can result in strictures, microperf orations, and fistulae. The inflammation is noncontiguous and thus can produce skip lesions throughout the bowel. Histologically, CD can have either transmural lymphoid aggregates or non-necrotizing granulomas. Although granulomas are pathognomonic, they are seen in only 40% of patients with CD. In contrast, UC is characterized by continuous superficial inflammation limited to the colon, beginning in the rectum and extending proximally.

[0003] Both CD and UC are chronic and most frequently have their onset in early adolescence or early adult life. The cause of IBD is unclear, though it is speculated that both environmental and genetic factors play a role. See Collins, P. et al, Ulcerative colitis: Diagnosis and Management” BMJ Vol. 333, 12 Aug. 2006 and Hanauer, S. Inflammatory Bowel Disease: Epidemiology, pathogenesis, and Therapeutic Opportunities. Inflamm. Bowel Dis. 2006 January; 12 Suppl. 1:53-9. Review. The most common symptom of both UC and CD is diarrhea, sometimes accompanied by abdominal cramps, tenesmus (straining at stool), blood, fever, fatigue, and loss of appetite. Some patients have alternating periods of remission with relapse or flare. Other patients have continuous symptoms without remission due to continued inflammation. The severity and responsiveness to treatment for IBD varies widely from individual to individual.

### Diagnosis

[0004] The diagnosis of UC or CD is established by finding characteristic intestinal ulcerations and excluding alternative diagnoses, such as enteric infections or ischemia. Active disease in UC is characterized by the endoscopic appearance of superficial ulcerations, friability, a distorted mucosal vascular pattern, and exudate. Patients with severely active disease can have deep ulcers and friability that result in spontaneous bleeding. The typical distribution of disease is continuous from the rectum proximally. However, patients with partially treated UC may have discontinuous or patchy involvement.

[0005] The ulcerations of CD may appear aphthoid, but could also be deep and serpiginous. Skip areas, a “cobblestone” appearance, pseudopolyps, and rectal sparing are characteristic findings. Air contrast barium enema, small-bowel series, or colonoscopy may demonstrate these typical lesions. On a small-bowel series, CD often is manifested by separation of bowel loops and a narrowed-terminal ileal lumen, the so-called “string sign.”

[0006] Histologic features of UC include disease limited to the mucosa and submucosa, mucin depletion, ulcerations, exudate, and crypt abscesses. In CD, non-necrotizing granulomas, transmural lymphoid aggregates, and microscopic skip lesions can be seen. Typical lesions of CD also may be seen in the upper gastrointestinal tract. The inflammation is localized in the ileocecal region in 50% of cases, the small bowel in 25% of cases, the colon in 20% of cases, and the upper gastrointestinal tract or perirectum in 5%.

### Assessment of Disease Activity

[0007] Disease activity including response to treatment or remission of disease in patients having UC may be assessed using the Clinical Activity Disease Index developed in 1955 by Truelove and Witts (See “Cortisone in ulcerative colitis: final report on a therapeutic trial,” BMJ 1955; 2: 1041-1048; See also Table 1). Patients with fulminant or toxic colitis usually have more than 10 bowel movements per day, continuous bleeding, abdominal distention and tenderness, and radiologic evidence of edema and possibly bowel dilation.

TABLE 1
Trulove and Witts Criteria for Assessing Disease Activity in Ulcerative
Colitis

| Criteria | Mild Activity | Severe Activity |
|---|---|---|
| Daily bowel movements (no.) | < or = to 5 | >5 |
| Hematochezia | Small amounts | Large amounts |
| Temperature | <37.5° C. | > or = to 37.5° C. |
| Pulse | <90/min | > or = 90/min |
| Erythrocyte sedimentation rate | <30 mm/h | > or = to 30 mm/h |
| Hemoglobin | >10 g/dl | < or = to 10 g/dl |

Patients with fewer than all 6 of the above criteria for severe activity have moderately active disease.

[0008] The severity of disease in CD patients may be determined using several clinical disease activity indices. For example, the Crohn's Disease Activity Index (CDAI) developed by Best et al. is often used in clinical trials to measure disease activity. (See Best W R, Becktel—A—J M, Singleton J W. “Rederived values of the eight coefficients of the Crohn's Disease Activity Index (CDAI),” Gastroenterology. 1979;77:843-846; Hyams J S, et al., “Development and Validation of a Pediatric Crohn's Disease Activity Index” J. Pediatric Gastroenterol. Nutr. 1991; 12:439-47; Hanauer S P et al, “Maintenance infliximab for Crohn's disease, the ACCENT I Randomized Trial” Lancet 2002; 359:1541-9, both incorporated herein by reference.) The index consists of eight factors, each summed after adjustment with a weighting factor. The components of the CDAI and weighting factors are listed in Table 2:

TABLE 2

| | Weighting |
|---|---|
| Clinical or laboratory variable | factor |
| Number of liquid or soft stools | x 2 |
| each day for seven days | |
| Abdominal pain (graded from 0-3 on severity) | x 6 |
| General well being, subjectively assessed | x 6 |
| from 0 (well) to 4 (terrible) | |
| Presence of complications* | x 30 |
| Number of infirm days | x 5 |
| (interpreted as non-functional days) | |
| Presence of an abdominal mass | x5 |
| (0 as none, 2 as questionable, 5 as definite) | |
| Hematocrit of <0.47 in men | x 6 |
| and <0.42 in women | |
| Percentage deviation from standard weight | x 1 |

*The complications were listed as follows: the presence of joint pains (arthralgia) or frank arthritis; inflammation of the iris (uveitis); the presence of erythema nodosum or pyoderma gangrenosum; aphthous ulcers; anal fissures, fistulae or abscesses; or fever over the previous week.

[0009] Remission of CD is defined as an absolute value of the CDAI of less than 150, while severe disease is defined as a value of greater than 450 in adults. Most major research studies on medications in CD define response as a fall of the CDAI of greater than 70 points. In pediatric patients, disease activity is measured in clinical trials using the PCDAI, and remission is defined as an absolute value of 10 or less, with moderate disease defined as greater than or equal to 30. Response in pediatric patients is defined as a fall of the PCDAI of 12.5 points.

[0010] Alternatively, the Harvey-Bradshaw index may be used to assess disease activity. The Harvey-Bradshaw index was devised in 1980 as a simpler version of the CDAI for data collection purposes. The index is described in Harvey R, Bradshaw J (1980). “A simple index of Crohn's-disease activity.” Lancet 1 (8167): 514, incorporated herein by reference. It consists of only clinical parameters listed in Table 3.

TABLE 3
Harvey-Bradshaw Index Clinical Parameters

general well-being (0 = very well, 1 = slightly below average,
2 = poor, 3 = very poor, 4 = terrible)
abdominal pain (0 = none, 1 = mild, 2 = moderate, 3 = severe)
number of liquid stools per day
abdominal mass (0 = none, 1 = dubious, 2 = definite,
3 = tender)
complications, as above, with one point for each.

[0011] In addition, the PCDAI index is well-established for defining remission and mild, moderate and severely active disease in pediatric disease, as described by Hyams J S, et al., “Development and Validation of a Pediatric Crohn's Disease Activity Index” J. Pediatric Gastroenterol. Nutr. 1991; 12:439-47, incorporated herein by reference.

### Therapeutic Treatment of IBD

[0012] The current approach to the treatment of CD is sequential: first to treat acute disease, then to maintain remission. The initial treatment is directed towards treatment of infection and reduction of inflammation. Current options for induction of remission in IBD include 5-aminosalicylic acid (5-ASA) drugs, corticosteroids, methotrexate, and infliximab. Options for maintenance of remission include mesalamine, the immunomodulators 6-mercaptopurine/azathioprine (6-MP/AZA), methotrexate and infliximab. Once remission is induced, the goal of treatment becomes maintenance of remission, avoiding the return of active disease, or “flares.” Where drug therapy fails, surgery may be required.

[0013] The most common first line regiment includes induction of remission with prednisone, and maintenance of remission with 6-MP/AZA or 5-ASA. However, this treatment yields a steroid-free remission rate of only fifty percent at one year, and a significant portion of patients fail to respond to first line therapy. To date, there are currently no established clinical tests for predicting response to first line therapy, and newly diagnosed patients must first be subjected to first line therapy, despite only a 50% chance of a successful outcome. In the absence of a reliable test to predict response to therapy, patients are empirically offered agents for induction and maintenance of remission largely based upon disease severity and location. As the effectiveness of any one agent is typically on the order of 50% to 80%, this leads to a substantial number of patients receiving a series of ineffective agents, with attendant side effects, before an effective regimen is identified.

[0014] The two most widely used drug families for IBD are steroids and 5-aminosalicylic acid (5-ASA) drugs, both of which reduce inflammation of the affected parts of the intestines. A non-limiting review of therapeutics commonly used for the treatment of IBD follows below.

### Steroids

[0015] Corticosteroids are used primarily for treatment of moderate to severe flares of CD. The most commonly prescribed oral steroid is prednisone, which is typically dosed at 1.0 mg/kg for induction of remission. Intravenous steroids are used for cases refractory to oral steroids, or where the patient cannot take oral steroids. Budesonide (formulated as Entocort) is an oral corticosteroid with fewer systemic adverse effects due to 90% first-pass metabolism by the liver. Budesonide is effective as a conventional corticosteroid treatment for distal ileal and right colonic disease, but is less potent in transverse and distal colonic disease. Budesonide is also useful when used in combination with antibiotics for active CD.

### Aminosalicylates

[0016] 5-aminosalicylic acid (5-ASA) drugs are also effective in inducing and maintaining remission for patients with UC, and may have a modest effect in some patients with CD. The 5-ASAs include mesalazine or mesalamine, which is marketed in the forms Asacol, Pentasa, Salofalk, Dipentum and Rowasa and, sulfasalazine (Azulfidine, Azulfidine EN-Tabs; Salazopyrin EN-Tabs, SAS in Canada; salazosulfapyridine, salicylazosulpapyridine), which is converted to 5-ASA and sulfapyridine by intestinal bacteria. The sulfapyridine may also have some therapeutic effect in addition to the 5-ASA. Two other aminosalicylates, olsalazine sodium (Dipentum) consisting of two 5-ASA moieties connected by an azobond, and balsalazide disodium (Colazal), a 5-ASA moiety attached to an inert molecule by an azobond, may be used to treat CD or UC.

### Immunosuppressive Medications

[0017] Immunosuppressive medications may also be used to treat patients with moderate to severe IBD. These include, for example, azathioprine and its active metabolite 6-mercaptopurine. Immunosuppressive drugs such as 6-mercaptopurine may be used for long-term treatment of IBD, and are particularly used for patients dependent on chronic high-dose steroid therapy. Azathioprine is a prodrug for 6-mercaptopurine, which is converted into 6-methylmercaptopurine by the enzyme thiopurine methyltransferase (TPMT) or 6-thioguanine by the enzyme hypoxanthine phosphoribosyltransferase.

[0018] Methotrexate is another immunosuppressive medication effective for induction and maintenance of remission in CD. Alternatively, cyclosporine may be used in patients with severe UC. Approximately 50% to 80% of patients refractory to intravenous corticosteroid treatment may avoid surgical treatment such as colectomy with intravenous cyclosporine treatment. Tacrolimus and mycophenolate mofetil may also be used as second-line immunosuppressive options.

[0019] TNF-Alpha Antagonists

[0020] Remicade is the first of a new class of agents for the treatment of Crohn's disease that block activity of a key biologic response mediator called tumour necrosis factor alpha (TNF-alpha). Overproduction of TNF-alpha leads to inflammation in autoimmune conditions such as Crohn's disease. It is believed that Remicade reduces intestinal inflammation in patients with Crohn's disease by binding to and neutralising TNF-alpha on the cell membrane and in the blood. Remicade is indicated for treatment of severe, active Crohn's disease in patients who have not responded despite a full and adequate course of therapy with a corticosteroid and/or an immunosuppressant, and as a treatment of fistulizing Crohn's disease in patients who have not responded despite a full and adequate course of therapy with conventional treatment.

[0021] Due to the side effects of first line therapy, the cost of treatment, and the delay in improving the quality of living among those suffering from IBD, there is an urgent and unmet need for determining the most effective course of treatment for IBD patients.

### Brief Summary

[0022] The instant disclosure generally relates to a method for classifying an individual having or suspected of having an inflammatory bowel disease as a responder or a non-responder to first-line therapy for the inflammatory bowel disease, wherein the first line therapy is one of 5-aminosalicylic acid (5-ASA) drugs, corticosteroids, methotrexate, or infliximab. The method generally comprises the steps of identifying an individual having or suspected of having an inflammatory bowel disease, such as Crohn's disease, obtaining a biological sample from the individual, isolating mRNA from the biological sample, determining the mRNA levels of one or more genes identified in any of Tables 4-8 to obtain a gene expression profile and comparing the gene expression profile to a suitable control such that the individual may be classified as a responder or a non-responder to first-line therapy. The control may be, for example, the gene expression profile of sample obtained from known responders or non-responders.

[0023] In one embodiment, gene expression is determined by PCR. In yet another embodiment, gene expression is determined by a technique using hybridization, for example, to a oligonucleotide of a predetermined sequence comprising DNA, RNA, cDNA, PNA, genomic DNA, or synthetic oligonucleotides.

[0024] In yet another embodiment, gene expression may be obtained by detection and/or measurement of the gene product, where the gene product is known or determined to reasonably correlate with gene expression.

[0025] The instant disclosure further relates to a gene expression system for identifying responders and non-responders to first line treatment for an inflammatory bowel disease in individuals having or suspected of having the disease, comprising a solid support having one or more oligonucleotides affixed to said solid support wherein the one or more nucleotides further comprises at least one sequence selected from those listed in Table 4, 5, 6, 7, or 8. The gene expression system may further comprise one or more normalization sequences and/or a reference standard. In one embodiment, the solid support comprises an array selected from the group consisting of a chip array, a plate array, a bead array, a pin array, a membrane array, a solid surface array, a liquid array, an oligonucleotide array, a polynucleotide array, a cDNA array, a microfilter plate, a membrane or a chip.

### DETAILED DESCRIPTION

### Definitions

[0026] Unless defined otherwise, technical and scientific terms used herein have the same meaning as commonly understood by one of ordinary skill in the art to which this invention belongs. Singleton et al., Dictionary of Microbiology and Molecular Biology 2nd ed., J. Wiley & Sons (New York, N.Y. 1994), provide one skilled in the art with a general guide to many of the terms used in the present application.

[0027] For purposes of the present invention, the following terms are defined below.

[0028] The term “array” or “microarray” in general refers to an ordered arrangement of hybridizable array elements such as polynucleotide probes on a substrate. An “array” is typically a spatially or logically organized collection, e.g., of oligonucleotide sequences or nucleotide sequence products such as RNA or proteins encoded by an oligonucleotide sequence. In some embodiments, an array includes antibodies or other binding reagents specific for products of a candidate library. The array element may be an oligonucleotide, DNA fragment, polynucleotide, or the like, as defined below. The array element may include any element immobilized on a solid support that is capable of binding with specificity to a target sequence such that gene expression may be determined, either qualitatively or quantitatively. When referring to a pattern of expression, a “qualitative” difference in gene expression refers to a difference that is not assigned a relative value. That is, such a difference is designated by an “all or nothing” valuation. Such an all or nothing variation can be, for example, expression above or below a threshold of detection (an on/off pattern of expression). Alternatively, a qualitative difference can refer to expression of different types of expression products, e.g., different alleles (e.g., a mutant or polymorphic allele), variants (including sequence variants as well as post-translationally modified variants), etc. In contrast, a “quantitative” difference, when referring to a pattern of gene expression, refers to a difference in expression that can be assigned a value on a graduated scale, (e.g., a 0-5 or 1-10 scale, a ++++ scale, a grade 1 grade 5 scale, or the like; it will be understood that the numbers selected for illustration are entirely arbitrary and in no-way are meant to be interpreted to limit the invention). Microarrays are useful in carrying out the methods disclosed herein because of the reproducibility between different experiments. DNA microarrays provide one method for the simultaneous measurement of the expression levels of large numbers of genes. Each array consists of a reproducible pattern of capture probes attached to a solid support. Labeled RNA or DNA is hybridized to complementary probes on the array and then detected by laser scanning. Hybridization intensities for each probe on the array are determined and converted to a quantitative value representing relative gene expression levels. See, U.S. Pat. Nos. 6,040,138, 5,800,992 and 6,020,135, 6,033,860, and 6,344,316, which are incorporated herein by reference. High-density oligonucleotide arrays are particularly useful for determining the gene expression profile for a large number of RNA's in a sample.

[0029] A “DNA fragment” includes polynucleotides and/or oligonucleotides and refers to a plurality of joined nucleotide units formed from naturally-occurring bases and cyclofuranosyl groups joined by native phosphodiester bonds. This term effectively refers to naturally-occurring species or synthetic species formed from naturally-occurring subunits. “DNA fragment” also refers to purine and pyrimidine groups and moieties which function similarly but which have non naturally-occurring portions. Thus, DNA fragments may have altered sugar moieties or inter-sugar linkages. Exemplary among these are the phosphorothioate and other sulfur containing species. They may also contain altered base units or other modifications, provided that biological activity is retained. DNA fragments may also include species that include at least some modified base forms. Thus, purines and pyrimidines other than those normally found in nature may be so employed. Similarly, modifications on the cyclofuranose portions of the nucleotide subunits may also occur as long as biological function is not eliminated by such modifications.

[0030] The term “polynucleotide,” when used in singular or plural, generally refers to any polyribonucleotide or polydeoxribonucleotide, which may be unmodified RNA or DNA or modified RNA or DNA. Thus, for instance, polynucleotides as defined herein include, without limitation, single- and double-stranded DNA, DNA including single- and double-stranded regions, single- and double-stranded RNA, and RNA including single- and double-stranded regions, hybrid molecules comprising DNA and RNA that may be single-stranded or, more typically, double-stranded or include single- and double-stranded regions. In addition, the term “polynucleotide” as used herein refers to triple-stranded regions comprising RNA or DNA or both RNA and DNA. The strands in such regions may be from the same molecule or from different molecules. The regions may include all of one or more of the molecules, but more typically involve only a region of some of the molecules. One of the molecules of a triple-helical region often is an oligonucleotide. Thus, DNAs or RNAs with backbones modified for stability or for other reasons are “polynucleotides” as that term is intended herein. Moreover, DNAs or RNAs comprising unusual bases, such as inosine, or modified bases, such as tritiated bases, are included within the term “polynucleotides” as defined herein. In general, the term “polynucleotide” embraces all chemically, enzymatically and/or metabolically modified forms of unmodified polynucleotides, as well as the chemical forms of DNA and RNA characteristic of viruses and cells, including simple and complex cells.

[0031] The term “oligonucleotide” refers to a relatively short polynucleotide, including, without limitation, single-stranded deoxyribonucleo tides, single- or double-stranded ribonucleotides, RNA:DNA hybrids and double-stranded DNAs. Oligonucleotides, such as single-stranded DNA oligonucleotides, are often synthesized by chemical methods, for example using automated oligonucleotide synthesizers that are commercially available. However, oligonucleotides can be made by a variety of other methods, including in vitro recombinant DNA-mediated techniques and by expression of DNAs in cells and organisms.

[0032] The terms “differentially expressed gene,” “differential gene expression” and their synonyms, which are used interchangeably, refer to a gene whose expression is activated to a higher or lower level in a subject, relative to its expression in a normal or control subject. A differentially expressed gene may be either activated or inhibited at the nucleic acid level or protein level, or may be subject to alternative splicing to result in a different polypeptide product. Such differences may be evidenced by a change in mRNA levels, surface expression, secretion or other partitioning of a polypeptide, for example. Differential gene expression may include a comparison of expression between two or more genes, or a comparison of the ratios of the expression between two or more genes, or even a comparison of two differently processed products of the same gene, which differ between normal subjects and subjects suffering from a disease, or between various stages of the same disease. Differential expression includes both quantitative, as well as qualitative, differences in the temporal or cellular expression pattern in a gene or its expression products. As used herein, “differential gene expression” can be present when there is, for example, at least an about a one to about two-fold, or about two to about four-fold, or about four to about six-fold, or about six to about eight-fold, or about eight to about ten-fold, or greater than about 11 told difference between the expression of a given gene in a patient of interest compared to a suitable control. However, a fold change less than one is not intended to be excluded, and to the extent such change can be accurately measured, a fold change less than one may be reasonably relied upon in carrying out the methods disclosed herein. In some embodiments, the fold change may be greater than about five or about 10 or about 20 or about 30 or about 40.

[0033] The phrase “gene expression profile” as used herein, is intended to encompass the general usage of the term as used in the art, and generally means the collective data representing gene expression with respect to a selected group of two or more genes, wherein the gene expression may be upregulated, downregulated, or unchanged as compared to a reference standard, A gene expression profile is obtained via measurement of the expression level of many individual genes. The expression profiles can be prepared using different methods. Suitable methods for preparing a gene expression profile include, but are not limited to quantitative RT-PCR, Northern Blot, in situ hybridization, slot-blotting, nuclease protection assay, nucleic acid arrays, and immunoassays. The gene expression profile may also be determined indirectly via measurement of one or more gene products (whether a full or partial gene product) for a given gene sequence, where that gene product is known or determined to correlate with gene expression.

[0034] The phrase “gene product” is intended to have the meaning as generally understood in the art and is intended to generally encompass the product(s) of RNA translation resulting in a protein and/or a protein fragment. The gene products of the genes identified herein may also be used for the purposes of diagnosis or treatment in accordance with the methods described herein.

[0035] A “reference gene expression profile” as used herein, is intended to indicate the gene expression profile, as defined above, for a preselected group which is useful for comparison to the gene expression profile of a subject of interest. For example, the reference gene expression profile may be the gene expression profile of a single individual known to not have an inflammatory bowel disease (i.e. a “normal” subject) or the gene expression profile represented by a collection of RNA samples from “normal” individuals that has been processed as a single sample. The “reference gene expression profile” may vary, and such variance will be readily appreciated by one of ordinary skill in the art.

[0036] The phrase “reference standard” as used herein may refer to the phrase “reference gene expression profile” or may more broadly encompass any suitable reference standard which may be used as a basis of comparison with respect to the measured variable. For example, a reference standard may be an internal control, the gene expression or a gene product of a “healthy” or “normal” subject, a housekeeping gene, or any unregulated gene or gene product. The phrase is intended to be generally non-limiting in that the choice of a reference standard is well within the level of skill in the art and is understood to vary based on the assay conditions and reagents available to one using the methods disclosed herein.

[0037] “Gene expression profiling” as used herein, refers to any method that can analyze the expression of selected genes in selected samples.

[0038] The phrase “gene expression system” as used herein, refers to any system, device or means to detect gene expression and includes diagnostic agents, candidate libraries, oligonucleotide sets or probe sets.

[0039] The terms “diagnostic oligonucleotide” or “diagnostic oligonucleotide set” generally refers to an oligonucleotide or to a set of two or more oligonucleotides that, when evaluated for differential expression their corresponding diagnostic genes, collectively yields predictive data. Such predictive data typically relates to diagnosis, prognosis, selection of therapeutic agents, monitoring of therapeutic outcomes, and the like. In general, the components of a diagnostic oligonucleotide or a diagnostic oligonucleotide set are distinguished from oligonucleotide sequences that are evaluated by analysis of the DNA to directly determine the genotype of an individual as it correlates with a specified trait or phenotype, such as a disease, in that it is the pattern of expression of the components of the diagnostic oligonucleotide set, rather than mutation or polymorphism of the DNA sequence that provides predictive value. It will be understood that a particular component (or member) of a diagnostic oligonucleotide set can, in some cases, also present one or more mutations, or polymorphisms that are amenable to direct genotyping by any of a variety of well known analysis methods, e.g., Southern blotting, RFLP, AFLP, SSCP, SNP, and the like.

[0040] The phrase “gene amplification” refers to a process by which multiple copies of a gene or gene fragment are formed in a particular cell or cell line. The duplicated region (a stretch of amplified DNA) is often referred to as “amplicon.” Usually, the amount of the messenger RNA (mRNA) produced, i.e., the level of gene expression, also increases in the proportion of the number of copies made of the particular gene expressed.

[0041] A “gene expression system” refers to any system, device or means to detect gene expression and includes diagnostic agents, candidate libraries oligonucleotide, diagnostic gene sets, oligonucleotide sets, array sets, or probe sets.

[0042] As used herein, a “probe” refers to the gene sequence arrayed on a substrate.

[0043] The terms “splicing” and “RNA splicing” are used interchangeably and refer to RNA processing that removes introns and joins exons to produce mature mRNA with continuous coding sequence that moves into the cytoplasm of an eukaryotic cell.

[0044] “Stringency” of hybridization reactions is readily determinable by one of ordinary skill in the art, and generally is an empirical calculation dependent upon probe length, washing temperature, and salt concentration. In general, longer probes require higher temperatures for proper annealing, while shorter probes need lower temperatures. Hybridization generally depends on the ability of denatured DNA to re-anneal when complementary strands are present in an environment below their melting temperature. The higher the degree of desired homology between the probe and hybridizable sequence, the higher the relative temperature which can be used. As a result, it follows that higher relative temperatures would tend to make the reaction conditions more stringent, while lower temperatures less so. For additional details and explanation of stringency of hybridization reactions, see Ausubel et al., Current Protocols in Molecular Biology, Wiley Interscience Publishers, (1995).

[0045] As used herein, a “target” refers to the sequence derived from a biological sample that is labeled and suitable for hybridization to a probe affixed on a substrate.

[0046] The term “treatment” refers to both therapeutic treatment and prophylactic or preventative measures, wherein the object is to prevent or slow down (lessen) the targeted pathologic condition or disorder. Those in need of treatment include those already with the disorder as well as those prone to have the disorder or those in whom the disorder is to be prevented.

[0047] The practice of the present invention will employ, unless otherwise indicated, conventional techniques of molecular biology (including recombinant techniques), microbiology, cell biology and biochemistry, which are within the skill of the art.

### Gene Expression Profiling

[0048] The present invention relates to a method of predicting the optimal course of therapy for patients having an inflammatory bowel disease (IBD), for example, Crohn's disease (CD) or ulcerative colitis (UC) using a diagnostic oligonucleotide set or gene expression profile as described herein, via classification of an individual having or suspected of having a inflammatory bowel disease as being either a “responder” or “non-responder” to first-line therapy. In one embodiment, the methods described herein may be used to predict the optimal course of therapy, or identify the efficacy of a given treatment in an individual having, or suspected of having an inflammatory bowel disease. In other embodiments, the methods described herein may be used to predict the optimal course of therapy post-diagnosis, for example, after treatment of an individual having an IBD has begun, such that the therapy may be changed or adjusted, in accordance with the outcome of the diagnostic methods.

[0049] The present invention also relates to diagnostic oligonucleotides and diagnostic oligonucleotide sets and methods of using the diagnostic oligonucleotides and oligonucleotide sets to diagnose or monitor disease, assess severity of disease, predict future occurrence of disease, predict future complications of disease, determine disease prognosis, evaluate the patient's risk, “stratify” or classify a group of patients, assess response to current drug therapy, assess response to current non-pharmacological therapy, identify novel therapeutic compounds, determine the most appropriate medication or treatment for the patient, predict whether a patient is likely to respond to a particular drug, and determine most appropriate additional diagnostic testing for the patient, as well as other clinically and epidemiologically relevant applications. As set forth above, the term “diagnostic oligonucleotide set” generally refers to a set of two or more oligonucleotides that, when evaluated for differential expression of their products, collectively yields predictive data. Such predictive data typically relates to diagnosis, prognosis, monitoring of therapeutic outcomes, and the like. In general, the components of a diagnostic oligonucleotide set are distinguished from nucleotide sequences that are evaluated by analysis of the DNA to directly determine the genotype of an individual as it correlates with a specified trait or phenotype, such as a disease, in that it is the pattern of expression of the components of the diagnostic nucleotide set, rather than mutation or polymorphism of the DNA sequence that provides predictive value. It will be understood that a particular component (or member) of a diagnostic nucleotide set can, in some cases, also present one or more mutations, or polymorphisms that are amenable to direct genotyping by any of a variety of well known analysis methods, e.g., Southern blotting, RFLP, AFLP, SSCP, SNP, and the like.

[0050] In another embodiment of the present invention, a gene expression system useful for carrying out the described methods is also provided. This gene expression system can be conveniently used for determining a diagnosis, prognosis, or selecting a treatment for patients having or suspected of having an IBD such as CD or UC.

[0051] In one embodiment, the methods disclosed herein allow one to classify an individual of interest as either a “responder” or a “non-responder” to first-line treatment using a gene expression profile. For purposes of the methods disclosed herein, the term “responder” refers to a patient that responds to first line therapy and does not require a second induction of remission during the year following the induction of remission. In contrast, the term “non-responder” refers to a patient having an IBD such as CD that will require a second induction of remission using any therapy. For example, treatment non-responders may require more than one course of corticosteroids, or anti-TNF, during the first year.

[0052] Thus, in accordance with the methods, a classification of an individual as a “responder” indicates that first line treatment is likely to be successful in treating the IBD, and as such, may be the treatment of choice, while an individual identified as being a non-responder would generally not be an ideal candidate for traditional first-line therapies. Rather, an individual identified as a non-responder would likely benefit from more aggressive, or second-line therapies typically reserved for individuals that have not responded to first-line treatment.

[0053] Classifying patients as either a “responder” or a “non-responder” is advantageous, in that it allows one to predict the optimal course of therapy for the patient. This classification may be useful at the outset of therapy (at the time of diagnosis) or later, when first-line therapy has already been initiated, such that treatment may be altered to the benefit of the patient.

[0054] In general, the method of using a gene expression profile or gene expression system for diagnosing an individual as a responder or a non-responder comprises measuring the gene expression of a gene identified in any of Tables 4-8 or the sequence listing. Gene expression, as used herein, may be determined using any method known in the art reasonably calculated to determine whether the expression of a gene is upregulated, down-regulated, or unchanged, and may include measurement of RNA or the gene product itself.

[0055] In one embodiment, an individual is characterized as a responder or nonresponder to first line therapy via measurement of the expression of one or more genes of Table 4 in the individual as compared to the expression of one or more genes of Table 4 in a suitable control (such as an individual previously determined to be a responder or nonresponder). In another embodiment the one or more genes are selected from Table 5. In another embodiment the one or more genes are selected from Table 6. In another embodiment the one or more genes are selected from Table 7. In another embodiment the one or more genes are selected from Table 8. The genes selected for measurement of expression may be selected on the basis of fold difference. For example, the genes may be those having a fold-change of greater than about 2 or about 3, or about 4 or about 5 as identified in any of Tables 4, 5, 6, 7, or 8.

[0056] In yet another embodiment, the method of identifying an individual having or suspected of having an inflammatory bowel disease such as comprises the steps of: 1) providing an array set immobilized on a substrate, wherein the array set comprises one or more oligonucleotides derived from the sequences listed in Tables 4-8, or the Sequence Listing, 2) providing a labeled target obtained from mRNA isolated from a biological sample from a patient having an IBD such as CD or UC, 3) hybridizing the labeled target to the array set under suitable hybridization conditions such that the labeled target hybridizes to the array elements, 4) determining the relative amounts of gene expression in the patient's biological sample as compared to a reference sample by detecting labeled target that is hybridized to the array set; 5) using the gene expression profile to classify the patient as a responder or a non-responder; and 6) predicting the optimal course of therapy based on said classification.

[0057] The one or more sequences that comprise the array elements may be selected from any of the sequences listed in Tables 4-8 or the Sequence Listing. In one embodiment, the gene expression system comprises one or more array elements wherein the one or more array elements correspond to sequences selected from those sequences listed in Tables 4-8, or the Sequence Listing. In one embodiment, the array set comprises the sequences listed in Table 5. In another embodiment, the array set comprises the sequences listed in Table 6.

[0058] The present invention also relates to an apparatus for predicting the optimal course of therapy in a patient having an inflammatory bowel disease such as CD or UC. The apparatus comprises a solid support having an array set immobilized thereon, wherein labeled target derived from mRNA from a patient of interest is hybridized to the one or more sequences of the array set on the solid support, such that a change in gene expression for each sequence compared to a reference sample or other suitable control may be determined, permitting a determination of the optimal course of therapy for the patient. The array set comprises one or more sequences selected from those listed in Tables 4-8 or the Sequence Listing described herein. In one embodiment, the array set comprises the sequences listed in Table 5. In another embodiment, the array set comprises the sequences listed in Table 6.

[0059] In yet another embodiment, the method of classifying an individual having or suspected of having an inflammatory bowel disease as a responder or non-responder comprises the steps of: 1) obtaining mRNA isolated from a biological sample from a patient having or suspected of having an inflammatory bowel disease, 2) reverse transcribing mRNA to obtain the corresponding DNA; 3) selecting suitable oligonucleotide primers corresponding to one or more genes selected from Tables 4-8 or the Sequence Listing, 4) combining the DNA and oligonucleotide primers in a suitable hybridization solution; 5) incubating the solution under conditions that permit amplification of the sequences corresponding to the primers; and 6) determining the relative amounts of gene expression in the patient's biological sample as compared to a reference sample or other suitable control; wherein the resulting gene expression profile can be used to classify the patient as a responder or a non-responder.

[0060] In other embodiments, real time PCR methods or any other method useful in measuring mRNA levels as known in the art may also be used. Alternatively, measurement of one or more gene products using any standard method of measuring protein (such as radioimmunoassay methods or Western blot analysis) may be used to determine a gene expression profile.

[0061] The methods of gene expression profiling that may be used with the methods and apparatus described herein are well-known in the art. In general, methods of gene expression profiling can be divided into methods based on hybridization analysis of polynucleotides, and methods based on sequencing of polynucleotides. Commonly used methods known in the art for the quantification of mRNA expression in a sample include northern blotting and in situ hybridization (Parker & Barnes, Methods in Molecular Biology 106:247 283 (1999)), RNAse protection assays (Hod, Biotechniques 13:852 854 (1992)), and reverse transcription polymerase chain reaction (RT-PCR) (Weis et al., Trends in Genetics 8:263 264 (1992)), or modified RT-PCR methods, such as that described in U.S. Pat. No. 6,618,679. Alternatively, antibodies may be employed that can recognize specific duplexes, including DNA duplexes, RNA duplexes, and DNA-RNA hybrid duplexes or DNA-protein duplexes. Representative methods for sequencing-based gene expression analysis include Serial Analysis of Gene Expression (SAGE), and gene expression analysis by massively parallel signature sequencing (MPSS). In one embodiment described herein, gene array technology such as microarray technology is used to profile gene expression.

### Arrays and Microarray Technologies

[0062] Array and microarray techniques known in the art to determine gene expression may be employed with the invention described herein. Where used herein, array refers to either an array or microarray. An array is commonly a solid-state grid containing sequences of polynucleotides or oligonucleotides (array elements) of known sequences are immobilized at a particular position (also referred to as an “address”) on the grid. Microarrays are a type of array termed as such due to the small size of the grid and the small amounts of nucleotide (such as nanogram, nanomolar or nanoliter quantities) that are usually present at each address. The immobilized array elements (collectively, the “array set”) serve as hybridization probes for cDNA or cRNA derived from messenger RNA (mRNA) isolated from a biological sample. An array set is defined herein as one or more DNA fragments or oligonucleotides, as defined above, that are immobilized on a solid support to form an array.

[0063] In one embodiment, for example, the array is a “chip” composed, e.g., of one of the above specified materials. Polynucleotide probes, e.g., RNA or DNA, such as cDNA, synthetic oligonucleotides, and the like, or binding proteins such as antibodies, that specifically interact with expression products of individual components of the candidate library are affixed to the chip in a logically ordered manner, i.e., in an array. In addition, any molecule with a specific affinity for either the sense or anti-sense sequence of the marker nucleotide sequence (depending on the design of the sample labeling), can be fixed to the array surface without loss of specific affinity for the marker and can be obtained and produced for array production, for example, proteins that specifically recognize the specific nucleic acid sequence of the marker, ribozymes, peptide nucleic acids (PNA), or other chemicals or molecules with specific affinity.

[0064] The techniques described herein, including array and microarray techniques, may be used to compare the gene expression profile of a biological sample from a patient of interest to the gene expression profile of a reference sample or other suitable control. The gene expression profile is determined by first extracting RNA from a biological sample of interest, such as from a patient diagnosed with an IBD. The RNA is then reverse transcribed into cDNA and labeled. In another embodiment, the cDNA may be transcribed into cRNA and labeled. The labeled cDNA or cRNA forms the target that may be hybridized to the array set comprising probes selected according the methods described herein. The reference sample obtained from a control patient is prepared in the same way. In one embodiment, both a test sample and reference sample may be used, the targets from each sample being differentially labeled (for example, with fluorophores having different excitation properties), and then combined and hybridized to the array under controlled conditions. In general, the labeled target and immobilized array sets are permitted, under appropriate conditions known to one of ordinary skill in the art, to hybridize such that the targets hybridize to complementary sequences on the arrays. After the array is washed with solutions of appropriately determined stringency to remove or reduce non-specific binding of labeled target, gene expression may be determined. The ratio of gene expression between the test sample and reference sample for a given gene determines the color and/or intensity of each spot, which can then be measured using standard techniques as known in the art. Analysis of the differential gene expression of a given array set provides an “expression profile” or “gene signature” for that array set. The expression profile is the pattern of gene expression produced by the experimental sample, wherein transcription of some genes are increased or decreased compared to the reference sample. Amplification methods using in vitro transcription may also be used to yield increased quantities of material to array where sample quantities are limited. In one embodiment, the Nugen Ovation amplification system may be incorporated into the protocol, as described below.

[0065] Commercially-produced, high-density arrays such as those manufactured by Affymetrix GeneChip (available from Affymetrix, Santa Clara, Calif.) containing synthesized oligonucleotides may be used with the methods disclosed herein. In one embodiment, the HGU133 Plus Version 2 Affymetrix GeneChip may be used to determine gene expression of an array sets comprising sequences listed in Tables 4-8 or the Sequence Listing.

[0066] In another embodiment, customized cDNA or oligonucleotide arrays may be manufactured by first selecting one or more array elements to be deposited on the array, selected from one or more sequences listed in Tables 4-8 or the Sequence Listing. Purified PCR products or other suitably derived oligonucleotides having the selected sequence may then be spotted or otherwise deposited onto a suitable matrix. The support may be selected from any suitable support known in the art, for example, microscope slides, glass, plastic or silicon chips, membranes such as nitrocellulose or paper, fibrous mesh arrangement, nylon filter arrays, glass-based arrays or the like. The array may be a chip array, a plate array, a bead array, a pin array, a membrane array, a solid surface array, a liquid array, an oligonucleotide array, a polynucleotide array, a cDNA array, a microfilter plate, a membrane or a chip. Where transparent surfaces such as microscope slides are used, the support provides the additional advantage of two-color fluorescent labeling with low inherent background fluorescence. The gene expression systems described above, such as arrays or microarrays, may be manufactured using any techniques known in the art, including, for example, printing with fine-pointed pins onto glass slides, photolithograpahy using dynamic micromirror devices, ink-jet printing, or electrochemistry on microelectrode arrays. Oligonucleotide adherence to the slide may be enhanced, for example, by treatment with polylysine or other cross-linking chemical coating or by any other method known in the art. The DNA or oligonucleotide may then be cross-linked by ultraviolet irradiation and denatured by exposure to either heat or alkali. The microarray may then be hybridized with labeled target derived from mRNA from one or more samples to be analyzed. For example, in one embodiment, cDNA or cRNA obtained from mRNA from colon samples derived from both a patient diagnosed with IBD and a healthy control sample is used. The samples may be labeled with different detectable labels such as, for example, fluorphores that exhibit different excitation properties. The samples may then be mixed and hybridized to a single microarray that is then scanned, allowing the visualization of up-regulated or down-regulated genes. The DualChip™ platform available from Eppendorf is an example of this type of array.

[0067] The probes affixed to the solid support in the gene expression system comprising the array elements may be a candidate library, a diagnostic agent, a diagnostic oligonucleotide set or a diagnostic probe set. In one embodiment of the present invention, the one or more array elements comprising the array set are selected from those sequences listed in Tables 4-8 or the Sequence Listing.

### Determination of Array Sets

[0068] A global pattern of gene expression in colon biopsies from Crohn's Disease (CD) patients at diagnosis (CDD), treated CD patients refractory to first line corticosteroid/6-MP therapy (chronic refractory, CDT), and healthy controls has been determined and is disclosed herein. cRNA was prepared from biopsies obtained from endoscopically affected segments, predominantly the ascending colon, with control biopsies obtained from matched segments in healthy patients. cRNA was labelled and then hybridized to the HGU133 Plus Version 2 Affymetrix GeneChip. RNA obtained from a pool of RNA from one normal colon specimen was labelled and hybridized to the GeneChip with each batch of new samples to serve as an internal control for batch to batch variability in signal intensity. Results were interpreted utilizing GeneSpring™ 7.3 Software (Silicon Genetics). Differentially expressed genes were identified by filtering levels of gene-specific signal intensity for statistically significant differences when grouped by clinical forms (e.g. healthy control versus CDD and healthy control versus CDT) using ANOVA, p values of <0.05 considered significant, without multiple testing correction and filtering for a fold-change expression level of at least 1.5-fold in the CDD versus normal and 2-fold for CDT versus normal. The overall gene expression profile was generated by gene tree hierarchical cluster analysis based on similarity of Pearson correlation, separation ratio 1, and minimal distance of 0.001.

[0069] An array set of 779 genes were identified. These genes, referred to as the Crohn's Disease Genomic Signature (Table 8) were differentially expressed in both CD colon at diagnosis and in chronic refractory disease, relative to healthy controls, with at least 1.5 fold difference in expression and significance level of at least 0.05. The global pattern of gene expression was substantially homogenous in the panel of chronic refractory patients, relative to a more heratogenous pattern in the CD patients at diagnosis, suggesting a distinct sub-set of CD patients that could be identified at diagnosis relative to their ultimate response to therapy. A cohort of CD patients having a known genomic signature was then prospectively followed.

[0070] From that cohort, responder patients and non-responder patients were identified. Treatment “responders” are defined as requiring one course of corticosteroids during the first year. Treatment “non-responders” are defined as requiring more than one course of corticosteroids, or anti-TNF, during the first year. The only clinical distinction between the responder and non-responder groups was the response to first line therapy, as they otherwise possessed similar age (12±1.2 vs 12±1.3, disease distribution, and clinical (Pediatric Crohn's Disease Activity Index (PCDAI): 40±9 vs 45±6) and histological (Crohn's Disease Histological Index of Severity (CDHIS): 6±1.8 vs 5±2) disease activity, respectively 70, 71. They also did not differ in the frequency of immunomodulator or mesalamine use.

[0071] Condition tree hierarchical cluster analysis using a distance correlation, in which the individual patients where grouped based upon similar patterns of gene expression and not pre-defined clinical subsets, has shown that most non-responders cluster together, with a pattern of gene expression intermediate between most responders and chronic refractory patients.

[0072] This gene set (the Crohn's Disease Genomic Signature, Table 8) was then reduced to smaller sets that can be used to distinguish responders from non-responders using the methods described herein. The smaller gene sets were identified via class prediction analysis using GeneSpring™ software, beginning with the CDGS gene set. The class prediction analysis used to arrive at the smaller gene sets is described in full below.

[0073] The smaller gene sets, referred to herein as “array sets” comprise the sequences disclosed in Tables 4-8 or the Sequence Listing. These array sets can be used to identify distinct sub-sets of CD patients at diagnosis, relative to their ultimate response to therapy. In particular, the gene sets, in one embodiment, may be used to determine whether a patient diagnosed with IBD may be classified as a “responder” or “non-responder,” thus permitting the clinician to predict the optimal course of therapy.

[0074] Thus, in one embodiment, gene expression methods can be used to define clinically meaningful sub-sets of IBD patients with respect to treatment response, using intestinal samples obtained at the time of diagnosis. Further, the CDGS and the K-nearest neighbors class prediction algorithm, using additional training and test sets derived from additional patient samples may be used to define novel array sets for predicting treatment response.

### Determination of a Gene Expression Profile

[0075] The present invention is related to methods of detecting gene expression using a gene expression system having one or more array elements wherein the array elements comprise one or more sequence that corresponds to sequence selected from those sequences listed in Tables 4-8 or the Sequence Listing, forming an array set. From the gene lists disclosed in Tables 4-8 and the Sequence Listing, it should be understood by one of ordinary skill in the art that standard methods of data analysis or using the disclosed methods (such as cluster analysis, K-nearest neighbors class prediction algorithms, or class prediction analysis using appropriately selected parameters) can be used to identify a smaller number of array elements, while still retaining the predictive characterisitics of the array sets disclosed herein. Non-limiting examples of data analysis that may be used are listed below.

[0076] In one embodiment, an array may be used to determine gene expression as described above. For example, PCR amplified inserts of cDNA clones may be applied to a substrate in a dense array. These cDNA may be selected from one or more of those sequences listed in Tables 4-8 or the Sequence Listing. In one embodiment, the array comprises a gene set further comprising one or more sequences listed in Table 4. In another embodiment, the array comprises an array set comprising one or more sequences listed in Table 5.

[0077] In another embodiment, the array (or gene expression system) comprises at least 2, 5, 10, 15, 20, 25, 30, 35, 40, 45, 50, 60, 70, 80, 90, 100, 150, 200, 250 or more different polynucleotide probes, each different probe capable of hybridizing to a different gene sequence listed in Table 6.

[0078] In another embodiment, the array (or gene expression system) comprises at least 2, 5, 10, 15, 20, 25, 30, 35, 40, 45, 50, 60, 70, 80, 90, 100, 150, 200, 250 or more different polynucleotide probes, each different probe capable of hybridizing to a different gene sequence listed in Table 7.

[0079] In another embodiment, the array (or gene expression system) comprising at least 2, 5, 10, 15, 20, 25, 30, 35, 40, 45, 50, 60, 70, 80, 90, 100, 150, 200, 250 or more different polynucleotide probes, each different probe capable of hybridizing to a different gene sequence listed in Table 8.

[0080] In one embodiment of the present invention, the array (or gene expression system) comprises a gene set further comprising from about 1 to about 1000 gene sequences, or about 200 to about 800 genes sequences, or about 20 to about 60 genes sequences, or about 10 to about 20 genes sequences, selected from the sequences listed in Tables 4-8 or the Sequence Listing.

[0081] In yet another embodiment, the selected genes include at least two groups of genes. The first group includes genes upregulated in inflammatory bowel disease compared to normal controls wherein the upregulated genes have IBD/Normal ratios of at least 2, 3, 4, 5, 10, or more. The second group includes genes downregulated in inflammatory bowel disease which have IBD/Normal ratios of no greater than 0.5, 0.333, 0.25, 0.2, 0.1, or less. Each group may include at least 1, 2, 4, 6, 8, 10, 12, 14, 16, 18, 20, or more genes.

[0082] It is also understood that each probe can correspond to one gene, or multiple probes can correspond to one gene, or both, or one probe can correspond to more than one gene. In some embodiments, DNA molecules are less than about any of the following lengths (in bases or base pairs): 10,000; 5,000; 2500; 2000; 1500; 1250; 1000; 750; 500; 300; 250; 200; 175; 150; 125; 100; 75; 50; 25; 10. In some embodiments, the DNA molecule is greater than about any of the following lengths (in bases or base pairs): 10; 15; 20; 25; 30; 40; 50; 60; 75; 100; 125; 150; 175; 200; 250; 300; 350; 400; 500; 750; 1000; 2000; 5000; 7500; 10000; 20000; 50000. Alternately, a DNA molecule can be any of a range of sizes having an upper limit of 10,000; 5,000; 2500; 2000; 1500; 1250; 1000; 750; 500; 300; 250; 200; 175; 150; 125; 100; 75; 50; 25; or 10 and an independently selected lower limit of 10; 15; 20; 25; 30; 40; 50; 60; 75; 100; 125; 150; 175; 200; 250; 300; 350; 400; 500; 750; 1000; 2000; 5000; 7500 wherein the lower limit is less than the upper limit.

[0083] Homologs and variants of the disclosed nucleic acid molecules in Tables 4-8 or the Sequence Listing may be used in the present invention. Homologs and variants of these nucleic acid molecules typically possess a relatively high degree of sequence identity when aligned using standard methods. Sequences suitable for use in the methods described herein have at least about 40-50, about 50-60, about 70-80, about 80-85, about 85-90, about 90-95 or about 95-100% sequence identity to the sequences disclosed herein.

[0084] The probes, immobilized on the selected substrate, are suitable for hybridization under conditions with appropriately determined stringency, such that targets binding non-specifically to the substrate or array elements are substantially removed. Appropriately labeled targets generated from mRNA are generated using any standard method as known in the art. For example, the targets may be cDNA targets generated through incorporation of fluorescent nucleotides by reverse transcription of RNA extracted from tissues of interest. Alternatively, biotin labeled targets may be used, such as using the method described herein. It should be clear that any suitable oligonucleotide-based target may be used. In another embodiment, suitably labeled cRNA targets may be used. Regardless of the type of target, the targets are such that the labeled targets applied to the chip hybridize to complementary probes on the array. After washing to minimize non-specific binding, the chip may be scanned by confocal laser microscopy or by any other suitable detection method known in the art, for example, a CCD camera. Quantification of hybridization at each spot in the array allows a determination of corresponding mRNA expression. With dual color fluorescence, separately labeled cDNA targets generated from two sources of RNA are hybridized pairwise to the array. The relative abundance of the transcripts from the two sources corresponding to each specified gene can then be determined simultaneously. (See Schena et al., Proc. Natl. Acad. Sci. USA 93(2): 106 149 (1996)). Microarray analysis can be performed by commercially available equipment, following manufacturer's protocols, such as by using the Affymetrix GenChip technology (for example, HGU133 Plus Version 2 Affymetrix GeneChip), or Incyte's microarray technology, or using any other methods as known in the art.

[0085] It is understood that for determination of a gene expression profile, variations in the disclosed sequences will still permit detection of gene expression. The degree of sequence identity required to detect gene expression varies depending on the length of the oligomer. For example, in a 60-mer, (an oligonucleotide with about 60 nucleotides), about 6 to about 8 random mutations or about 6 to about 8 random deletions in a 60-mer do not affect gene expression detection. Hughes, T R, et al. “Expression profiling using microarrays fabricated by an ink-jet oligonucleotide synthesizer. Nature Biotechnology, 19:343-347 (2001). As the length of the DNA sequence is increased, the number of mutations or deletions permitted while still allowing gene expression detection is increased.

[0086] As will be appreciated by those skilled in the art, the sequences of the present invention may contain sequencing errors. That is, there may be incorrect nucleotides, frameshifts, unknown nucleotides, or other types of sequencing errors in any of the sequences; however, the correct sequences will fall within the homology and stringency definitions herein.

### Additional Methods of Determining Gene Expression

[0087] The array sets disclosed herein may also be used to determine a gene expression profile such that a patient may be classified as a responder or a nonresponder any other techniques that measure gene expression. For example, the expression of genes disclosed in the array sets herein may be detected using RT-PCR methods or modified RT-PCR methods. In this embodiment, RT-PCR is used to detect gene expression of genes selected from one or more genes selected from the array sets listed in Tables 4-8 or the Sequence Listing.

[0088] Various methods using RT-PCR may be employed. For example, standard RT-PCR methods may be used. Using this method, well-known in the art, isolated RNA may be reverse transcribed using into cDNA using standard methods as known in the art. This cDNA is then exponentially amplified in a PCR reaction using standard PCR techniques. The reverse transcription step is typically primed using specific primers, random hexamers, or oligo-dT primers, depending on the circumstances and the goal of expression profiling. For example, extracted RNA can be reverse-transcribed using a GeneAmp RNA PCR kit (Perkin Elmer, Calif., USA), following the manufacturer's instructions. The derived cDNA can then be used as a template in the subsequent PCR reaction. Although the PCR step can use a variety of thermostable DNA-dependent DNA polymerases, it typically employs the Taq DNA polymerase, which has a 5′-3′ nuclease activity but lacks a 3′-5′ proofreading endonuclease activity. Thus, TaqMan® PCR typically utilizes the 5′-nuclease activity of Taq or Tth polymerase to hydrolyze a hybridization probe bound to its target amplicon, but any enzyme with equivalent 5′ nuclease activity can be used. Two oligonucleotide primers are used to generate an amplicon typical of a PCR reaction. A third oligonucleotide is designed to detect nucleotide sequence located between the two PCR primers. The third oligonucleotide is non-extendible by Taq DNA polymerase enzyme, and is labeled with a reporter fluorescent dye and a quencher fluorescent dye. Any laser-induced emission from the reporter dye is quenched by the quenching dye when the two dyes are located close together as they are on the probe. During the amplification reaction, the Taq DNA polymerase enzyme cleaves the third oligonucleotide in a template-dependent manner. The resultant fragments disassociate in solution, and signal from the released reporter dye is free from the quenching effect of the second fluorophore. One molecule of reporter dye is liberated for each new molecule synthesized, and detection of the unquenched reporter dye provides the basis for quantitative interpretation of the data. TaqMan® RT-PCR can be performed using commercially available equipment, such as, for example, ABI PRISM 7700™ Sequence Detection System™ (Perkin-Elmer-Applied Biosystems, Foster City, Calif., USA), or Lightcycler (Roche Molecular Biochemicals, Mannheim, Germany). In a preferred embodiment, the 5′ nuclease procedure is run on a real-time quantitative PCR device such as the ABI PRISM 7700™ Sequence Detection System™. The system consists of a thermocycler, laser, charge-coupled device (CCD), camera and computer. The system amplifies samples in a 96-well format on a thermocycler. During amplification, laser-induced fluorescent signal is collected in real-time through fiber optics cables for all 96 wells, and detected at the CCD. The system includes software for running the instrument and for analyzing the data. To minimize errors and the effect of sample-to-sample variation, RT-PCR is usually performed using an internal standard. The ideal internal standard is expressed at a constant level among different tissues, and is unaffected by the experimental treatment. RNAs most frequently used to normalize patterns of gene expression are mRNAs for the housekeeping genes glyceraldehyde-3-phosphate-dehydrogenase (GAPDH) and β-actin, although any other housekeeping gene or other gene established to be expressed at constant levels between comparison groups can be used.

[0089] Real time quantitative PCR techniques, which measure PCR product accumulation through a dual-labeled fluorigenic target (i.e., TaqMan® probe) may also be used with the methods disclosed herein to determine a gene expression profile. The Stratagene Brilliant SYBR Green QPCR reagent, available from 11011 N. Torrey Pines Road, La Jolla, Calif. 92037, may also be used. The SYBR® Green dye binds specifically to double-stranded PCR products, without the need for sequence-specific targets. Real time PCR is compatible both with quantitative competitive PCR, where internal competitor for each target sequence is used for normalization, and with quantitative comparative PCR using a normalization gene contained within the sample, or a housekeeping gene for RT-PCR. For further details see, e.g. Held et al., Genome Research 6:986 994 (1996).

[0090] Alternatively, a modified RT-PCR method such as eXpress Profiling™ (XP) technology for high-throughput gene expression analysis, available from Althea Technologies, Inc. 11040 Roselle Street, San Diego, Calif. 92121 U.S.A. may be used to determine a gene expression profiles of a patient diagnosed with IBD. The gene expression analysis may be limited to one or more array sets as disclosed herein. This technology is described in U.S. Pat. No. 6,618,679, incorporated herein by reference. This technology uses a modified RT-PCR process that permits simultaneous, quantitative detection of expression levels of about 20 genes. This method may be complementary to or used in place of array technology or PCR and RT-PCR methods to determine or confirm a gene expression profile, for example, when classifying the status of a patient as a responder or non-responder.

[0091] Multiplex mRNA assays may also be used, for example, that described in Tian, et al., “Multiplex mRNA assay using Electrophoretic tags for high-throughput gene expression analysis,” Nucleic Acids Research 2004, Vol. 32, No. 16, published online Sep. 8, 2004 and Elnifro, et al. “Multiplex PCR: Optimization and Application in Diagnostic Virology,” Clinical Microbiology Reviews, October 2000, p. 559-570, both incorporated herein by reference. In multiplex CR, more than one target sequence can be amplified by including more than one pair of primers in the reation.

### Collection and Preparation of Sample

[0092] The methods disclosed herein employ a biological sample derived from patients diagnosed with an IBD such as UC or CD. The samples may include, for example, tissue samples obtained by biopsy of endoscopically affected colonic segments including the cecum/ascending, transverse/descending or sigmoid/rectum; small intestine; ileum; intestine; cell lysates; serum; or blood samples. Colon epithelia cells and lamina propria cells may be used for mRNA isolation. Control biopsies are obtained from the same source. Sample collection will depend on the target tissue or sample to be assayed.

[0093] Immediately after collection of a biological sample, the sample may be placed in a medium appropriate for storage of the sample such that degradation of mRNA is minimized and stored on ice. For example, a suitable medium for storage of sample until processing is RNALater®, available from Applied Biosystems, 850 Lincoln Centre Drive, Foster City Calif. 94404, U.S.A. Total RNA may then be prepared from a target sample using standard methods for RNA extraction known in the art and disclosed in standard textbooks of molecular biology, including Ausubel et al., Current Protocols of Molecular Biology, John Wiley and Sons (1997). For example, RNA isolation can be performed using purification kit, buffer set and protease from commercial manufacturers, such as Qiagen, according to the manufacturer's instructions. In one embodiment, total RNA is prepared utilizing the Qiagen RNeasy mini-column, available from QIAGEN Inc., 27220 Turnberry Lane Suite 200, Valencia, Calif. 91355. Other commercially available RNA isolation kits include MasterPure™ Complete DNA and RNA Purification Kit (EPICENTRE®, Madison, Wis.), or Paraffin Block RNA Isolation Kit (Ambion, Inc.). Total RNA from tissue samples may also be isolated using RNA Stat-60 (Tel-Test). RNA may also be prepared, for example, by cesium chloride density gradient centrifugation. RNA quality may then be assessed. RNA quality may be determined using, for example, the Agilent 2100 Bioanalyzer. Acceptable RNA samples have distinctive 18S and 28S Ribosomal RNA Bands and a 28S/18S ribosomal RNA ratio of about 1.5 to about 2.0.

[0094] In one embodiment, about 400 to about 500 nanograms of total RNA per sample is used to prepare labeled mRNA as targets. The RNA may be labeled using any methods known in the art, including for example, the TargetAmp 1-Round Aminoallyl-aRNA Amplification Kit available from Epicentre to prepare cRNA, following the manufacturer's instructions. The TargetAmp 1-Round Aminoallyl-aRNA Amplification Kit (Epicentre) is used to make double-stranded cDNA from total RNA. An in vitro transcription reaction creates cRNA target. Biotin-X-X-NHS (Epicentre) is used to label the aminoallyl-aRNA with biotin following the manufacturer's instructions. In one embodiment, the biotin-labeled cRNA target is then chemically fragmented and a hybridization cocktail is prepared and hybridized to a suitable array set immobilized on a suitable substrate. For example, the labeled cRNA may be hybridized to an Affymetrix Genechip Array (HGU133 Plus Version 2 Affymetrix GeneChip, available from Affymetrix, 3420 Central Expressway, Santa Clara, Calif. 95051). In this embodiment, the hybridization cocktail contains 0.034 ug/uL fragmented cRNA, 50 pM Control Oligonucleotide B2 (Affymetrix), 2OX Eukaryotic Hybridization Controls (1.5 pM bioB, 5 pM bioC, 25 pM bioD, 100 pM ere) (Affymetrix), 0.1 mg/mL Herring Sperm DNA (Promega), 0.5 mg/mL Acetylated BSA (Invitrogen), and IX Hybridization Buffer, though it should be understood that any suitable hybridization cocktail may be used.

[0095] In another embodiment, the total RNA may be used to prepare cDNA targets. The targets may be labeled using any suitable labels known in the art. The labeled cDNA targets may then be hybridized under suitable conditions to any array set or subset of an array set described herein, such that a gene expression profile may be obtained.

[0096] Normalization

[0097] Normalization is an adjustment made to microarray gene expression values to correct for potential bias or error introduced into an experiment. With respect to array-type analyses, such errors may be the result of unequal amounts of cDNA probe, differences in dye properties, differences in dye incorporation etc. Where appropriate, the present methods include the step of normalizing data to minimize the effects of bias or error. The type of normalization used will depend on the experimental design and the type of array being used. The type of normalization used will be understood by one of ordinary skill in the art.

[0098] Levels of Normalization

[0099] There may be two types of normalization levels used with the methods disclosed herein: “within slide” (this compensates, for example, for variation introduced by using different printing pins, unevenness in hybridization or, in the case of two channel arrays, differences in dye incorporation between the two samples) or “between slides,” which is sometimes referred to as “scaling” and permits comparison of results of different slides in an experiment, replicates, or different experiments.

[0100] Normalization Methods

[0101] Within slide normalization can be accomplished using local or global methods as known in the art. Local normalization methods include the use of “housekeeping genes” and “spikes” or “internal controls”. “Housekeeping” genes are genes which are known, or expected, not to change in expression level despite changes in disease state or phenotype or between groups of interest (such as between known non-responders and responders). For example, common housekeeping genes used to normalize data are those that encode for ubiquitin, actin and elongation factors. Where housekeeping genes are used, expression intensities on a slide are adjusted such that the housekeeping genes have the same intensity in all sample assays.

[0102] Normalization may also be achieved using spikes or internal controls that rely on RNA corresponding to particular probes on the microarray slide being added to each sample. These probes may be from a different species than the sample RNAs and optimally should not cross-hybridize to sample RNAs. For two channel arrays, the same amount of spike RNA is added to each sample prior to labeling and normalization is determined via measurement of the spiked features. Spikes can also be used to normalize spatially across a slide if the controls have been printed by each pin—the same controls on different parts of the slide should hybridize equally. Spikes may also be used to normalize between slides.

[0103] Reference samples may be any suitable reference sample or control as will be readily understood by one of skill in the art. For example, the reference sample may be selected from normal patients, “responder” patients, “non-responder” patients, or “chronic-refractory patients.” Normal patients are those not diagnosed with an IBD. “Responder” patients and “non-responder” patients are described above. “Chronic refractory” patients are patients with moderate to severe disease that require a second induction of remission using any drug. In one embodiment of the present invention, the control sample comprises cDNA from one or more patients that do not have an inflammatory bowel disease. In this embodiment, the cDNA of multiple normal samples are combined prior to labeling, and used as a control when determining gene expression of experimental samples. The data obtained from the gene expression analysis may then be normalized to the control cDNA.

[0104] A variety of global normalization methods may be used including, for example, linear regression. This method is suitable for two channel arrays and involves plotting the intensity values of one sample against the intensity values of the other sample. A regression line is then fitted to the data and the slope and intercept calculated. Intensity values in one channel are then adjusted so that the slope=1 and the intercept is 0. Linear regression can also be carried out using MA plots. These are plots of the log ratio between the Cy5 and Cy3 channel values against the average intensity of the two channels. Again regression lines are plotted and the normalized log ratios are calculated by subtracting the fitted value from the raw log ratio. In the alternative, lowess regression (locally weighted polynomial regression) may be used. This regression method again uses MA plots but is a non-linear regression method. This normalization method is suitable if the MA plots show that the intensity of gene expression is influencing the log ratio between the channels. Lowess essentially applies a large number of linear regressions using a sliding window of the data.

[0105] Yet another alternative method of normalization is “print tip normalization.” This is a form of spatial normalization that relies on the assumption that the majority of genes printed with individual print tips do not show differential expression. Either linear or non-linear regression can be used to normalize the data. Data from features printed by different print tips are normalized independently. This type of normalization is especially important when using single channel arrays.

[0106] Yet another method of normalization is “2D lowess normalization.” This form of spatial normalization uses a 2d polynomial lowess regression that is fitted to the data using a false color plot of log ratio or intensity as a function of the position of the feature on the array. Values are adjusted according to this polynomial. “Between slide normalization” enables you to compare results from different slides, whether they are two channel or single channel arrays.

[0107] Centering and scaling may also be used. This adjusts the distributions of the data (either of log ratios or signal intensity) on different slides such that the data is more similar. These adjustments ensure that the mean of the data distribution on each slide is zero and the standard deviation is 1. For each value on a slide, the mean of that slide is subtracted and the resulting value divided by the standard deviation of the slide. This ensures that the “spread” of the data is the same in each slide you are comparing.

[0108] Quantile normalization is yet another method that is particularly useful for comparing single channel arrays. Using this method, the data points in each slide are ranked from highest to lowest and the average computed for the highest values, second highest values and so on. The average value for that position is then assigned to each slide, i.e. the top ranked data point in each slide becomes the average of the original highest values and so on. This adjustment ensures that the data distributions on the different slides are identical.

[0109] Various tools for normalizing data are known in the art, and include GenePix, Excel, GEPAS, TMeV/MIDAS and R.

### Hybridization Techniques

[0110] Where array techniques are used to determine a gene expression profile, the targets must be hybridized to the array sets under suitable hybridization conditions using hybridization and wash solutions having appropriate stringency, such that labeled targets may hybridize to complementary probe sequences on the array. Washes of appropriate stringency are then used to remove non-specific binding of target to the array elements or substrate. Determination of appropriate stringency is within the ordinary skill of one skilled in the art.

[0111] In one embodiment of the present invention, the array set is that of the Affymetrix Genechip Array (HGU133 Plus Version 2 Affymetrix GeneChip, available from Affymetrix, 3420 Central Expressway, Santa Clara, Calif. 95051). In this embodiment, suitably labeled cRNA and hybridization cocktail are first prepared. In this embodiment, the hybridization cocktail contains about 0.034 ug/uL fragmented cRNA, about 50 pM Control Oligonucleotide B2 (available from Affymetrix), 2OX Eukaryotic Hybridization Controls (1.5 pM bioB, 5 pM bioC, 25 pM bioD, 100 pM ere) (available from Affymetrix), about 0.1 mg/mL Herring Sperm DNA (Promega), about 0.5 mg/mL Acetylated BSA (Invitrogen). The hybridization cocktail is heated to 99° C. for 5 minutes, to 45° C. for 5 minutes, and spun at maximum speed in a microcentrifuge for 5 minutes. The probe array is then filled with 200 uL of IX Hybridization Buffer (available from Affymetrix) and incubated at 45° C. for 10 minutes while rotating at 60 rpm. The IX Hybridization Buffer is removed and the probe array filled with 200 uL of the hybridization cocktail. The probe array is then incubated at 45° C. for about 16 hours in a hybridization oven rotating at 60 rpm.

[0112] The array is then washed and stained using any method as known in the art. In one embodiment, the Fluidics Station 450 (Affymetrix) and the fluidics protocol EukGE-WS2v4_{—}450 is used. This protocol comprises the steps of a first post-hybridization wash (10 cycles of 2 mixes/cycle with Affymetrix Wash Buffer A at 25° C.), a second post-hybridization wash (4 cycles of 15 mixes/cycle with Affymetrix Wash Buffer B at 50° C.), a first stain (staining the probe array for 10 minutes with Affymetrix Stain Cocktail 1 at 25° C.), a post-stain wash (10 cycles of 4 mixes/cycle with Affymetrix Wash Buffer A at 25° C.), a second stain (stain the probe array for 10 minutes with Stain Cocktail 2 at 25° C.), a third stain (stain the probe array for 10 minutes with Stain Cocktail 3 at 25° C.) and a final wash (15 cycles of 4 mixes/cycle with Wash Buffer A at 30° C. The holding temperature is 25° C.). All Wash Buffers and Stain Cocktails are those provided in the GeneChip® Hybridization, Wash and Stain Kit, Manufactured for Affymetrix, Inc., by Ambion, Inc., available from Affymetrix. In one embodiment, the stain used is R-Phycoerythrin Streptavidin, available from Molecular Probes. The antibody used is anti-streptavidin antibody (goat) biotinylated, available from Vector Laboratories.

[0113] Data Collection and Processing

[0114] When using an array to determine a gene expression profile, the data from the array must be obtained and processed. The data may then be used for any of the purposes set forth herein, such as to predict the outcome of a therapeutic treatment or to classify a patient as a responder or nonresponder.

[0115] Following appropriate hybridization and wash steps, the substrate containing the array set and hybridized target is scanned. Data is then collected and may be saved as both an image and a text file. Precise databases and tracking of files should be maintained regarding the location of the array elements on the substrates. Information on the location and names of genes should also be maintained. The files may then be imported to software programs that perform image analysis and statistical analysis functions.

[0116] The gene expression profile of a patient of interest is then determined from the collected data. This may be done using any standard method that permits qualitative or quantitative measurements as described herein. Appropriate statistical methods may then be used to predict the significance of the variation in the gene expression profile, and the probability that the patient's gene expression profile is within the category of non-responder or responder. For example, in one embodiment, the data may be collected, then analyzed such that a class determination may be made (i.e., categorizing a patient as a responder or nonresponder) using a class prediction algorithm and GeneSpring™ software as described below.

[0117] Expression patterns can be evaluated by qualitative and/or quantitative measures. Qualitative methods detect differences in expression that classify expression into distinct modes without providing significant information regarding quantitative aspects of expression. For example, a technique can be described as a qualitative technique if it detects the presence or absence of expression of a candidate nucleotide sequence, i.e., an on/off pattern of expression. Alternatively, a qualitative technique measures the presence (and/or absence) of different alleles, or variants, of a gene product.

[0118] In contrast, some methods provide data that characterize expression in a quantitative manner. That is, the methods relate expression on a numerical scale, e.g., a scale of 0-5, a scale of 1-10, a scale of +−+++, from grade 1 to grade 5, a grade from a to z, or the like. It will be understood that the numerical, and symbolic examples provided are arbitrary, and that any graduated scale (or any symbolic representation of a graduated scale) can be employed in the context of the present invention to describe quantitative differences in nucleotide sequence expression. Typically, such methods yield information corresponding to a relative increase or decrease in expression.

[0119] Any method that yields either quantitative or qualitative expression data is suitable for evaluating expression. In some cases, e.g., when multiple methods are employed to determine expression patterns for a plurality of candidate nucleotide sequences, the recovered data, e.g., the expression profile, for the nucleotide sequences is a combination of quantitative and qualitative data.

[0120] In some applications, expression of the plurality of candidate nucleotide sequences is evaluated sequentially. This is typically the case for methods that can be characterized as low- to moderate-throughput. In contrast, as the throughput of the elected assay increases, expression for the plurality of candidate nucleotide sequences in a sample or multiple samples is assayed simultaneously. Again, the methods (and throughput) are largely determined by the individual practitioner, although, typically, it is preferable to employ methods that permit rapid, e.g. automated or partially automated, preparation and detection, on a scale that is time-efficient and cost-effective.

[0121] It is understood that the preceding discussion is directed at both the assessment of expression of the members of candidate libraries and to the assessment of the expression of members of diagnostic nucleotide sets.

[0122] Many techniques have been applied to the problem of making sense of large amounts of gene expression data. Cluster analysis techniques (e.g., K-Means), self-organizing maps (SOM), principal components analysis (PCA), and other analysis techniques are all widely available in packaged software used in correlating this type of gene expression data.

[0123] Class Prediction

[0124] In one embodiment, the data obtained may be analyzed using a class prediction algorithm to predict whether a subject is a non-responder or a responder, as defined above. Class prediction is a supervised learning method in which the algorithm learns from samples with known class membership (the training set) and establishes a prediction rule to classify new samples (the test set). Class prediction consists of several steps. The first is feature selection, a process by which genes within a defined gene set are scored for their ability to distinguish between classes (responders and non-responders) in the training set. Genes may be selected for uses as predictors, by individual examination and ranking based on the power of the gene to discriminate responders from non-responders. Genes may then be scored on the basis of the best prediction point for responders or non-responders. The score function is the negative natural logarithm of the p-value for a hypergeometric test of predicted versus actual group membership for responder versus non-responder. A combined list for responders and non-responders for the most discriminating genes may then be produced, up to the number of predictor genes specified by the user. The Golub method may then be used to test each gene considered for the predictor gene set for its ability to discriminate responders from non-responders using a signal-to-noise ratio. Genes with the highest scores may then be kept for subsequent calculations. A subset of genes with high predictive strength may then used in class prediction, with cross validation performed using the known groups from the training set. The K-nearest neighbors approach may be used to classify training set samples during cross validation, and to classify test set samples once the predictive rule had been established. In this system, each sample is classified by finding the K-nearest neighboring training set samples (where K is the number of neighbors defined by the user) plotted based in Euclidean space over normalized expression intensity for each of the genes in the predictor set. For example, a predictive gene set of twenty members may be selected using four nearest neighbors. Depending on the number of samples available, the k value may vary. The class membership of the selected number of nearest neighbors to each sample is enumerated and p-values computed to determine the likelihood of seeing at least the observed number of neighbors from each class relative to the whole training set by chance in a K-sized neighborhood. With this method, the confidence in class prediction is best determined by the ratio of the smallest p-value and the second smallest p-value, termed the decision cut-off p-value. If it is lower, the test sample is classified as the class corresponding to the smallest p-value. If it is higher, a prediction is not made. In one embodiment, a decision cut-off p-value ratio of about 0.5 may be used. Cross validation in GeneSpring may then be then done by a drop-one-out algorithm, in which the accuracy of the prediction rule is tested. This approach removes one sample from the training set and uses it as a test sample. By predicting the class of a given sample only after it is removed from the training set, the rule makes unbiased prediction of the sample class. Once performance of the predictive rule has been optimized in this fashion, it may be tested using additional samples.

### Cluster Analysis

[0125] Cluster analysis is a loose term covering many different algorithms for grouping data. Clustering can be divided into two main types: top-down and bottom-up. Top-down clustering starts with a given number of clusters or classes and proceeds to partition the data into these classes. Bottom-up clustering starts by grouping data at the lowest level and builds larger groups by bringing the smaller groups together at the next highest level.

[0126] K-Means is an example of top-down clustering. K-means groups data into K number of best-fit clusters. Before using the algorithm, the user defines the number of clusters that are to be used to classify the data (K clusters). The algorithm randomly assigns centers to each cluster and then partitions the nearest data into clusters with those centers. The algorithm then iteratively finds new centers by averaging over the data in the cluster and reassigning data to new clusters as the centers change. The analysis iteratively continues until the centers no longer move (Sherlock, G., Current Opinion in Immunology, 12:201, 2000).

[0127] Tree clustering is an example of bottom-up clustering. Tree clustering joins data together by assigning nearest pairs as leaves on the tree. When all pairs have been assigned (often according to either information-theoretical criteria or regression methods), the algorithm progresses up to the next level joining the two nearest groups from the prior level as one group. Thus, the number and size of the clusters depends on the level. Often, the fewer clusters, the larger each cluster will be. The stoppage criteria for such algorithms varies, but often is determined by an analysis of the similarity of the members inside the cluster compared to the difference across the clusters.

[0128] Self-organizing maps (SOMs) are competitive neural networks that group input data into nearest neighbors (Torkkola, K., et al., Information Sciences, 139:79, 2001; Toronen, P., et al., FEBS Letters, 451:142 146, 1999). As data is presented to the neural network, neurons whose weights currently are capable of capturing that data (the winner neuron) are updated toward the input. Updating the weights, or training the neural net, shifts the recognition space of each neuron toward a center of similar data. SOMs are similar to K-means with the added constraint that all centers are on a 1 or 2 dimensional manifold (i.e., the feature space is mapped into a 1 or 2 dimensional array, where new neighborhoods are formed). In SOM, the number of neurons is chosen to be much larger than the possible number of the clusters. It is hoped that the clusters of trained neurons will provide a good estimation of the number of the neurons. In many cases, however, a number of small clusters are formed around the larger clusters, and there is no practical way of distinguishing such smaller clusters from, or of merging them into, the larger clusters. In addition, there is no guarantee that the resulting clusters of genes actually exhibit statistically independent expression profiles. Thus, the members of two different clusters may exhibit similar patterns of gene expression.

[0129] Principal component analysis (PCA), although not a clustering technique in its nature (Jolliffe, I. T., Principal Component Analysis, New York: Springer-Verlag, 1986) can also be used for clustering (Yeung, K. Y., et al., Bioinformatics, 17:763, 2001). PCA is a stepwise analysis that attempts to create a new component axis at each step that contains most of the variation seen for the data. Thus, the first component explains the first most important basis for the variation in the data, the second component explains the second most important basis for the variation in the data, the third component the third most important basis, and so on. PCA projects the data into a new space spanned by the principal components. Each successive principal component is selected to be orthogonal to the previous ones, and to capture the maximum information that is not already present in the previous components. The principal components are therefore linear combinations (or eigenarrays) of the original data. These principal components are the classes of data in the new coordinate generated by PCA. If the data is highly non-correlated, then the number of significant principal components can be as high as the number of original data values. If, as in the case of DNA microarray experiments, the data is expected to correlate among groups, than the data should be described by a set of components which is fewer than the full complement of data points.

[0130] A variety of systems known in the art may be used for image analysis and compiling the data. For example, where the mRNA is labeled with a fluorescent tag, and fluorescence imaging system (such as the microarray processor commercially available from AFFYMETRIX®, Santa Clara, Calif.) may be used to capture, and quantify the extent of hybridization at each address. Or, in the case where the mRNA is radioactive, the array may be exposed to X-ray film and a photographic image made. Once the data is collected, it may be compiled to quantify the extent of hybridization at each address as for example, using software to convert the measured signal to a numerical value.

[0131] Any publicly available imaging software may be used. Examples include BioDiscovery (ImaGene), Axon Instruments (GenePix Pro 6.0), EisenLab—Stanford University (ScanAlyze), Spotfinder (TIGR), Imaxia (ArrayFox), F-Scan (Analytical Biostatistics Section—NIH), MicroDiscovery (GeneSpotter), CLONDIAG (IconoClust), Koada Technology (Koadarray), Vigene Tech (Micro Vigene), Nonlinear Dynamics (Phoretix), CSIRO Mathematical and Information Sciences (SPOT) Niles Scientific (SpotReader).

[0132] Any commercially available data analysis software may also be used. Examples include, BRB Array Tools (Biometric Research Branch—NCI), caGEDA (University of Pittsburgh), Cleaver 1.0 (Stanford Biomedical Informatics), ChipSC2C (Peterson Lab—Baylor College of Medicine), Cluster (Eisen Lab—Stanford/UC Berkeley), DNA-Chip Analyzer (dChip) (Wong Laboratory—Harvard University), Expression Profiler (European Bioinformatics Institute), FuzzyK (Eisen Lab—Stanford/UC Berkeley), GeneCluster 2.0 (Broad Institute), GenePattern (Broad Institute), GeneXPress (Stanford University), Genesis (Alexander Sturn—Graz University of Technology), GEPAS (Spanish National Cancer Center), GLR (University of Utah), GQL (Max Planck Institute for Molecular Genetics), INCLUSive (Katholieke Universiteit Leuven), Maple Tree (Eisen Lab—Stanford/UC Berkeley) MeV (TIGR) MIDAS (TIGR), Onto-Tools (Sorin Draghici—Wayne State University), Short Time-series Expression Miner (Carnegie Mellon University), Significance Analysis of Microarrays (Rob Tibshirani—Stanford University), SNOMAD (Johns Hopkins Schools of Medicine and Public Health), SparseLOGREG (Shevade & Keerthi—National University of Singapore), SuperPC Microarrays (Rob Tibshirani—Stanford University), Table View (University of Minnesota), TreeView (Eisen Lab—Stanford/UC Berkeley), Venn Mapper (Universitais Medisch Centrum Rotterdam), Applied Maths (GeneMaths XT), Array Genetics (AffyMate), Axon Instruments (Acuity 4.0) BioDiscovery (GeneSight), BioSieve (ExpressionSieve), CytoGenomics (SilicoCyte), Microarray Data Analysis (GeneSifter), MediaCybernetics (ArrayPro Analyzer), Microarray Fuzzy Clustering (BioRainbow), Molmine (J-Express Pro), Optimal Design (Array Miner), Partek (Partek Pro) Predictive Patterns Software (GeneLinker), Promoter Extractor (BioRainbow) SAS Microarray Silicon Genetics (GeneSpring), Spotfire (Spotfire), Strand Genomics (Avadis) Vialogy Corp.

[0133] It should also be understood that confounding factors may exist in individual subjects that may affect the ability of a given gene set to predict responders versus non-responders. These cofounding variables include variation in medications, such as cases in which concurrent 6-MP with infliximab overcomes the adverse effects of an unfavorable FasL polymorphism on response, the CARD15 genotype status, or the location of the biopsy, due to variation of gene expression along the colon. To account for this variation, outliers may be identified, and subsequently determined whether the outliers may be accounted for by variations in medication use, CARD 15 genotype, or the location of the colon biopsy.

[0134] Kits

[0135] In an additional aspect, the present invention provides kits embodying the methods, compositions, and systems for analysis of gene expression as described herein. Kits of the present invention may comprise one or more of the following: a) at least one pair of universal primers; b) at least one pair of target-specific primers, wherein the primers are specific to one or more sequences listed in Tables 4-8 or the sequence listing; c) at least one pair of reference gene-specific primers; and d) one or more amplification reaction enzymes, reagents, or buffers. The universal primers provided in the kit may include labeled primers. The target-specific primers may vary from kit to kit, depending upon the specified target gene(s) to be investigated, and may also be labeled. Exemplary reference gene-specific primers (e.g., target-specific primers for directing transcription of one or more reference genes) include, but are not limited to, primers for β-actin, cyclophilin, GAPDH, and various rRNA molecules.

[0136] The kits of the invention optionally include one or more preselected primer sets that are specific for the genes to be amplified. The preselected primer sets optionally comprise one or more labeled nucleic acid primers, contained in suitable receptacles or containers. Exemplary labels include, but are not limited to, a fluorophore, a dye, a radiolabel, an enzyme tag, etc., that is linked to a nucleic acid primer itself.

[0137] In addition, one or more materials and/or reagents required for preparing a biological sample for gene expression analysis are optionally included in the kit. Furthermore, optionally included in the kits are one or more enzymes suitable for amplifying nucleic acids, including various polymerases (RT, Taq, etc.), one or more deoxynucleotides, and buffers to provide the necessary reaction mixture for amplification.

[0138] In one embodiment of the invention, the kits are employed for analyzing gene expression patterns using mRNA as the starting template. The mRNA template may be presented as either total cellular RNA or isolated mRNA. In other embodiments, the methods and kits described in the present invention allow quantification of other products of gene expression, including tRNA, rRNA, or other transcription products. In still further embodiments, other types of nucleic acids may serve as template in the assay, including genomic or extragenomic DNA, viral RNA or DNA, or nucleic acid polymers generated by non-replicative or artificial mechanism, including PNA or RNA/DNA copolymers.

[0139] Optionally, the kits of the present invention further include software to expedite the generation, analysis and/or storage of data, and to facilitate access to databases. The software includes logical instructions, instructions sets, or suitable computer programs that can be used in the collection, storage and/or analysis of the data. Comparative and relational analysis of the data is possible using the software provided.

[0140] Array Sets 1-5 are listed below in Tables 4-8.

TABLE 4
Array Set 1
IBD Patients Gene Expression Relative to Healthy Controls (p < 0.05)

| Affymetrix | GenBank | | Fold |
|---|---|---|---|
| Number | Accession No. | Gene Name | Change |
| NM_001099_at | NM_001099 | ACPP | 1.837 |
| NM_001150_at | NM_001150 | ANPEP | 0.285 |
| NM_004900_at | NM_004900 | APOBEC3B | 0.352 |
| NM_001169_at | NM_001169 | AQP8 | 0.263 |
| NM_006829_at | NM_006829 | C10orf116 | 0.405 |
| NM_001276_at | NM_001276 | CHI3L1 | 5.374 |
| NM_001855_at | NM_001855 | COL15A1 | 1.981 |
| NM_001845_at | NM_001845 | COL4A1 | 1.81 |
| NM_000093_at | NM_000093 | COL5A1 | 1.664 |
| NM_001849_at | NM_001849 | COL6A2 | 2.069 |
| NM_001511_at | NM_001511 | CXCL1 | 6.583 |
| NM_002994_at | NM_002994 | CXCL5 | 4.465 |
| NM_002993_at | NM_002993 | CXCL6 | 5.086 |
| NM_000772_at | NM_000772 | CYP2C18 | 0.436 |
| NM_013974_at | NM_013974 | DDAH2 | 0.529 |
| NM_139160_at | NM_139160 | DEPDC7 | 0.436 |
| NM_207581_at | NM_207581 | DUOXA2 | 2.53 |
| NM_001425_at | NM_001425 | EMP3 | 2.027 |
| NM_001249_at | NM_001249 | ENTPD5 | 0.439 |
| NM_016594_at | NM_016594 | FKBP11 | 2.848 |
| NM_002023_at | NM_002023 | FMOD | 1.724 |
| NM_212474_at | NM_212474 | FN1 | 1.867 |
| NM_212475_at | NM_212475 | FN1 | 1.867 |
| NM_212478_at | NM_212478 | FN1 | 1.867 |
| NM_212476_at | NM_212476 | FN1 | 1.866 |
| NM_212482_at | NM_212482 | FN1 | 1.865 |
| NM_002026_at | NM_002026 | FN1 | 1.858 |
| NM_001491_at | NM_001491 | GCNT2 | 0.536 |
| NM_145655_at | NM_145655 | GCNT2 | 0.535 |
| NM_145649_at | NM_145649 | GCNT2 | 0.535 |
| NM_024307_at | NM_024307 | GDPD3 | 0.565 |
| NM_001031718_at | NM_001031718 | GDPD3 | 0.564 |
| NM_014905_at | NM_014905 | GLS | 0.546 |
| NM_004297_at | NM_004297 | GNA14 | 2.074 |
| NM_198447_at | NM_198447 | GOLT1A | 0.455 |
| NM_000558_at | NM_000558 | HBA1 | 2.245 |
| NM_000517_at | NM_000517 | HBA2 | 1.903 |
| NM_002153_at | NM_002153 | HSD17B2 | 0.309 |
| NM_000198_at | NM_000198 | HSD3B2 | 0.151 |
| NM_006855_at | NM_006855 | KDELR3 | 2.278 |
| NM_005564_at | NM_005564 | LCN2 | 2.882 |
| NM_012318_at | NM_012318 | LETM1 | 0.653 |
| NM_005925_at | NM_005925 | MEP1B | 0.122 |
| NM_152637_at | NM_152637 | METTL7B | 0.483 |
| NM_002422_at | NM_002422 | MMP3 | 10.8 |
| NM_138928_at | NM_138928 | MOCS1 | 0.522 |
| NM_005943_at | NM_005943 | MOCS1 | 0.521 |
| NM_005942_at | NM_005942 | MOCS1 | 0.521 |
| NM_145015_at | NM_145015 | MRGPRF | 1.8 |
| NM_015419_at | NM_015419 | MXRA5 | 1.931 |
| NM_153292_at | NM_153292 | NOS2A | 2.877 |
| NM_000625_at | NM_000625 | NOS2A | 2.874 |
| NM_153240_at | NM_153240 | NPHP3 | 0.584 |
| NM_002593_at | NM_002593 | PCOLCE | 1.979 |
| NM_000439_at | NM_000439 | PCSK1 | 3.694 |
| NM_000440_at | NM_000440 | PDE6A | 0.397 |
| NM_007350_at | NM_007350 | PHLDA1 | 1.807 |
| NM_015900_at | NM_015900 | PLA1A | 2.31 |
| NM_145202_at | NM_145202 | PRAP1 | 0.291 |
| NM_002742_at | NM_002742 | PRKD1 | 1.548 |
| NM_058179_at | NM_058179 | PSAT1 | 2.612 |
| NM_021154_at | NM_021154 | PSAT1 | 2.603 |
| NM_002841_at | NM_002841 | PTPRG | 1.743 |
| NM_016339_at | NM_016339 | RAPGEFL1 | 0.495 |
| NM_003469_at | NM_003469 | SCG2 | 1.909 |
| NM_000295_at | NM_000295 | SERPINA1 | 1.917 |
| NM_001002236_at | NM_001002236 | SERPINA1 | 1.916 |
| NM_001002235_at | NM_001002235 | SERPINA1 | 1.916 |
| NM_016276_at | NM_016276 | SGK2 | 0.399 |
| NM_170693_at | NM_170693 | SGK2 | 0.399 |
| NM_003051_at | NM_003051 | SLC16A1 | 0.41 |
| NM_004695_at | NM_004695 | SLC16A5 | 0.487 |
| NM_005415_at | NM_005415 | SLC20A1 | 0.57 |
| NM_007231_at | NM_007231 | SLC6A14 | 8.39 |
| NM_014464_at | NM_014464 | TINAG | 0.498 |
| NM_015444_at | NM_015444 | TMEM158 | 2.778 |
| NM_024873_at | NM_024873 | TNIP3 | 1.655 |
| NM_178234_at | NM_178234 | TUSC3 | 2.835 |
| NM_006765_at | NM_006765 | TUSC3 | 2.831 |
| NM_057179_at | NM_057179 | TWIST2 | 1.572 |
| NM_004666_at | NM_004666 | VNN1 | 2.398 |
| NM_025079_at | NM_025079 | ZC3H12A | 1.905 |
| NM_174945_at | NM_174945 | ZNF575 | 0.554 |
| NM_001008397_at | NM_001008397 | | 3.388 |
| NM_016459_at | NM_016459 | | 2.341 |
| NM_001018060_at | NM_001018060 | | 0.496 |
| NM_138342_at | NM_138342 | | 0.475 |
| NM_178859_at | NM_178859 | | 0.474 |
| NM_144704_at | NM_144704 | | 0.467 |
| XM_930288_at | XM_930288 | | 0.464 |
| XM_943650_at | XM_943650 | | 0.463 |
| XM_943644_at | XM_943644 | | 0.463 |
| XM_938362_at | XM_938362 | | 0.463 |
| XM_943655_at | XM_943655 | | 0.463 |
| XM_934563_at | XM_934563 | | 0.463 |
| XM_934567_at | XM_934567 | | 0.463 |
| XM_934562_at | XM_934562 | | 0.462 |
| XM_943653_at | XM_943653 | | 0.46 |
| XM_934566_at | XM_934566 | | 0.459 |
| NM_152672_at | NM_152672 | | 0.17 |

TABLE 5
Array Set 2 (n = 20, derived using the k-nearest neighbors algorithm)
Gene Expression of Responder (R) and NonResponder (NR) Patients with IBD

| Affymetrix | GenBank | Gene | Fold | Fold | Predictive |
|---|---|---|---|---|---|
| Number | Accession No. | Name | Change (R) | Change (NR) | Strength |
| NM_001169_at | NM_001169 | AQP8 | 0.6 | 0.1 | 4.2 |
| NM_000093_at | NM_000093 | COL5A1 | 0.7 | 1.2 | 4.2 |
| NM_002023_at | NM_002023 | FMOD | 1 | 1.9 | 5.8 |
| NM_024307_at | NM_024307 | GDPD3 | 1.5 | 0.8 | 4.2 |
| NM_001031718_at | NM_001031718 | GDPD3 | 1.5 | 0.8 | 4.2 |
| NM_004297_at | NM_004297 | GNA14 | 1 | 1.7 | 5.8 |
| NM_198447_at | NM_198447 | GOLT1A | 1.1 | 0.6 | 4.2 |
| NM_012318_at | NM_012318 | LETM1 | 1.3 | 0.8 | 4.2 |
| NM_153292_at | NM_153292 | NOS2A | 2.4 | 4.3 | 4.2 |
| NM_000625_at | NM_000625 | NOS2A | 2.4 | 4.3 | 4.2 |
| NM_000439_at | NM_000439 | PCSK1 | 0.8 | 5.6 | 5.8 |
| NM_016339_at | NM_016339 | RAPGEFL1 | 0.9 | 0.5 | 4.2 |
| NM_000295_at | NM_000295 | SERPINA1 | 1.5 | 3.1 | 4.2 |
| NM_001002236_at | NM_001002236 | SERPINA1 | 1.5 | 3.1 | 4.2 |
| NM_001002235_at | NM_001002235 | SERPINA1 | 1.5 | 3.1 | 4.2 |
| NM_016276_at | NM_016276 | SGK2 | 0.9 | 0.3 | 4.2 |
| NM_170693_at | NM_170693 | SGK2 | 0.9 | 0.3 | 4.2 |
| NM_015444_at | NM_015444 | TMEM158 | 1.3 | 3.9 | 4.2 |
| NM_001008397_at | NM_001008397 | | 2 | 4.4 | 5.8 |
| NM_178859_at | NM_178859 | | 1 | 0.4 | 4.2 |

TABLE 6
Array Set 3 (n = 24, derived using ANOVA)
Gene Expression of Responder (R) and Non-Responder (NR) Patients with IBD

| Affymetrix | GenBank | Gene | Fold | Fold | |
|---|---|---|---|---|---|
| Number | Accession No. | Name | Change (R) | Change (NR) | P Value |
| NM_001150_at | NM_001150 | ANPEP | 1.1 | 0.3 | 0.0356 |
| NM_006829_at | NM_006829 | C10orf116 | 0.8 | 0.4 | 0.0213 |
| NM_000093_at | NM_000093 | COL5A1 | 0.7 | 1.2 | 0.0188 |
| NM_001249_at | NM_001249 | ENTPD5 | 1 | 0.5 | 0.0323 |
| NM_001491_at | NM_001491 | GCNT2 | 1 | 0.6 | 0.00966 |
| NM_145655_at | NM_145655 | GCNT2 | 1 | 0.6 | 0.00973 |
| NM_145649_at | NM_145649 | GCNT2 | 1 | 0.6 | 0.0105 |
| NM_024307_at | NM_024307 | GDPD3 | 1.5 | 0.8 | 0.0203 |
| NM_001031718_at | NM_001031718 | GDPD3 | 1.5 | 0.8 | 0.0205 |
| NM_198447_at | NM_198447 | GOLT1A | 1.1 | 0.6 | 0.0244 |
| NM_006855_at | NM_006855 | KDELR3 | 2 | 3.3 | 0.0173 |
| NM_005564_at | NM_005564 | LCN2 | 6.6 | 17 | 0.0136 |
| NM_005925_at | NM_005925 | MEP1B | 0.7 | 0.3 | 0.0156 |
| NM_153292_at | NM_153292 | NOS2A | 2.4 | 4.3 | 0.00602 |
| NM_000625_at | NM_000625 | NOS2A | 2.4 | 4.3 | 0.00609 |
| NM_000439_at | NM_000439 | PCSK1 | 0.8 | 5.6 | 0.00188 |
| NM_145202_at | NM_145202 | PRAP1 | 0.7 | 0.3 | 0.00805 |
| NM_003051_at | NM_003051 | SLC16A1 | 0.6 | 0.3 | 0.0297 |
| NM_015444_at | NM_015444 | TMEM158 | 1.3 | 3.9 | 0.0305 |
| NM_004666_at | NM_004666 | VNN1 | 1.5 | 5 | 0.016 |
| NM_025079_at | NM_025079 | ZC3H12A | 1.5 | 2.7 | 0.0383 |
| NM_001008397_at | NM_001008397 | | 2 | 4.4 | 0.00181 |
| NM_178859_at | NM_178859 | | 1 | 0.4 | 0.0228 |
| NM_152672_at | NM_152672 | | 0.7 | .01 | 0.0172 |

TABLE 7
Array Set 4
Colon Gene Set Differentially Expressed Between Responders (R) and Non-
Responders (NR).

| | | | | Non- |
|---|---|---|---|---|
| | | Predictive | Responder | responder |
| Gene | Function | Strength | Expression | Expression |
| DDAH2 | nitric oxide generation | 1.5 | 0.7 | 0.4 |
| EMP1 | adhesion | 1.2 | 0.7 | 0.3 |
| ENTPD5 | catabolism of extracellular nucleotides | 1.1 | 0.8 | 0.4 |
| GCNT2 | CHO antigen processing | 1.0 | 0.8 | 0.4 |
| GLS | phosphate-activated glutaminase | 1.3 | 0.8 | 0.5 |
| GNA14 | guanine nucleotide binding protein | 1.2 | 1.4 | 2.6 |
| KDELR3 | ER protein sorting | 1.1 | 1.9 | 3.6 |
| LCN2 | PMN granule protein | 1.4 | 4.2 | 12.3 |
| LOC49386 | oxidative stress response | 1.2 | 2.4 | 5.2 |
| MYH10 | myosin, heavy polypeptide 10, non- | 1.0 | 1.3 | 2.7 |
| | muscle | | | |
| NOS2A | nitric oxide synthase 2A | 1.0 | 2 | 3.3 |
| PCSK1 | proprotein convertase | 1.4 | 1 | 6.6 |
| PRAP1 | proline-rich acidic protein 1 | 1.0 | 0.6 | 0.2 |
| SAA2 | APR | 1.0 | 1.3 | 4 |
| SLC20A1 | solute carrier family 20 (phosphate | 1.2 | 0.7 | 0.3 |
| | transporter), member 1 | | | |
| TUSC3 | tumor suppressor | 1.3 | 1.3 | 3.1 |
| TWSG1 | twisted gastrulation homolog 1 | 1.0 | 1.2 | 2.2 |
| VNN1 | oxidative stress response | 1.2 | 2 | 11.9 |

TABLE 8
Array Set 5
Crohn's Disease Genomic Signature

| | Affymetrix | GenBank | | |
|---|---|---|---|---|
| Gene Name | Number | Accession No. | Fold Change | Sequence ID No. |
| ACADS | NM_000017_at | NM_000017 | 0.557 | 1. |
| ACOT4 | NM_152331_at | NM_152331 | 0.537 | 2. |
| ACOT8 | NM_183386_at | NM_183386 | 0.651 | 3. |
| ACOT8 | NM_005469_at | NM_005469 | 0.626 | 4. |
| ACOT8 | NM_183385_at | NM_183385 | 0.626 | 5. |
| ACPP | NM_001099_at | NM_001099 | 1.837 | 6. |
| ACSL4 | NM_004458_at | NM_004458 | 2.084 | 7. |
| ACSL4 | NM_022977_at | NM_022977 | 2.076 | 8. |
| ACVR1 | NM_001105_at | NM_001105 | 1.763 | 9. |
| ADAM19 | NM_033274_at | NM_033274 | 1.904 | 10. |
| ADAM9 | NM_003816_at | NM_003816 | 1.726 | 11. |
| ADAM9 | NM_001005845_at | NM_001005845 | 1.725 | 12. |
| ADAMTS1 | NM_006988_at | NM_006988 | 2.112 | 13. |
| ADCY3 | NM_004036_at | NM_004036 | 1.54 | 14. |
| ADM | NM_001124_at | NM_001124 | 2.344 | 15. |
| AGA | NM_000027_at | NM_000027 | 1.564 | 16. |
| AGBL2 | NM_024783_at | NM_024783 | 0.557 | 17. |
| AGT | NM_000029_at | NM_000029 | 2.162 | 18. |
| AHSA2 | NM_152392_at | NM_152392 | 0.632 | 19. |
| AK1 | NM_000476_at | NM_000476 | 0.58 | 20. |
| AKAP2 | NM_001004065_at | NM_001004065 | 1.769 | 21. |
| AKR7A3 | NM_012067_at | NM_012067 | 0.608 | 22. |
| ALS2CL | NM_182775_at | NM_182775 | 0.613 | 23. |
| ALS2CL | NM_147129_at | NM_147129 | 0.613 | 24. |
| AMICA1 | NM_153206_at | NM_153206 | 1.77 | 25. |
| ANPEP | NM_001150_at | NM_001150 | 0.285 | 26. |
| ANTXR1 | NM_032208_at | NM_032208 | 1.503 | 27. |
| ANXA1 | NM_000700_at | NM_000700 | 2.056 | 28. |
| ANXA3 | NM_005139_at | NM_005139 | 1.687 | 29. |
| ANXA5 | NM_001154_at | NM_001154 | 1.725 | 30. |
| APCDD1 | NM_153000_at | NM_153000 | 2.807 | 31. |
| APOBEC3B | NM_004900_at | NM_004900 | 0.352 | 32. |
| APOBEC3G | NM_021822_at | NM_021822 | 2.302 | 33. |
| APOL1 | NM_003661_at | NM_003661 | 1.916 | 34. |
| APOL1 | NM_145343_at | NM_145343 | 1.913 | 35. |
| APOL3 | NM_014349_at | NM_014349 | 2.036 | 36. |
| APOL3 | NM_030644_at | NM_030644 | 2.034 | 37. |
| APOL3 | NM_145639_at | NM_145639 | 2.032 | 38. |
| APOL3 | NM_145641_at | NM_145641 | 2.032 | 39. |
| APOL3 | NM_145640_at | NM_145640 | 2.032 | 40. |
| APOL3 | NM_145642_at | NM_145642 | 2.029 | 41. |
| AQP8 | NM_001169_at | NM_001169 | 0.263 | 42. |
| ARFGAP3 | NM_014570_at | NM_014570 | 2.138 | 43. |
| ARHGEF3 | NM_019555_at | NM_019555 | 1.729 | 44. |
| ARMCX2 | NM_177949_at | NM_177949 | 1.673 | 45. |
| ARMCX2 | NM_014782_at | NM_014782 | 1.672 | 46. |
| ASPH | NM_032468_at | NM_032468 | 1.505 | 47. |
| ASPHD2 | NM_020437_at | NM_020437 | 1.717 | 48. |
| ATP2C1 | NM_001001486_at | NM_001001486 | 1.514 | 49. |
| ATP2C1 | NM_001001485_at | NM_001001485 | 1.513 | 50. |
| ATP2C1 | NM_001001487_at | NM_001001487 | 1.513 | 51. |
| AVIL | NM_006576_at | NM_006576 | 0.553 | 52. |
| AYTL2 | NM_024830_at | NM_024830 | 1.73 | 53. |
| B4GALNT2 | NM_153446_at | NM_153446 | 0.582 | 54. |
| BAG2 | NM_004282_at | NM_004282 | 1.802 | 55. |
| BAIAP2L2 | NM_025045_at | NM_025045 | 0.57 | 56. |
| BMP6 | NM_001718_at | NM_001718 | 1.918 | 57. |
| BNIP3 | NM_004052_at | NM_004052 | 2.227 | 58. |
| BSG | NM_198589_at | NM_198589 | 0.662 | 59. |
| BSG | NM_198590_at | NM_198590 | 0.662 | 60. |
| BSG | NM_198591_at | NM_198591 | 0.662 | 61. |
| BSG | NM_001728_at | NM_001728 | 0.661 | 62. |
| BTN3A2 | NM_007047_at | NM_007047 | 1.603 | 63. |
| C10orf116 | NM_006829_at | NM_006829 | 0.405 | 64. |
| C12orf28 | NM_182530_at | NM_182530 | 0.567 | 65. |
| C14orf29 | NM_181814_at | NM_181814 | 0.546 | 66. |
| C14orf29 | NM_181533_at | NM_181533 | 0.542 | 67. |
| C16orf14 | NM_138418_at | NM_138418 | 0.524 | 68. |
| C1orf116 | NM_023938_at | NM_023938 | 0.529 | 69. |
| C1orf188 | NM_173795_at | NM_173795 | 0.618 | 70. |
| C1orf38 | NM_001039477_at | NM_001039477 | 2.147 | 71. |
| C1orf38 | NM_004848_at | NM_004848 | 2.144 | 72. |
| C1QB | NM_000491_at | NM_000491 | 3.16 | 73. |
| C1R | NM_001733_at | NM_001733 | 2.263 | 74. |
| C1S | NM_001734_at | NM_001734 | 2.359 | 75. |
| C1S | NM_201442_at | NM_201442 | 2.358 | 76. |
| C20orf100 | NM_032883_at | NM_032883 | 1.981 | 77. |
| C20orf56 | NR_001558_at | NR_001558 | 1.788 | 78. |
| C4A | NM_007293_at | NM_007293 | 2.775 | 79. |
| C4B | NM_001002029_at | NM_001002029 | 2.774 | 80. |
| C4BPA | NM_000715_at | NM_000715 | 2.228 | 81. |
| C4BPB | NM_001017366_at | NM_001017366 | 1.876 | 82. |
| C4BPB | NM_001017367_at | NM_001017367 | 1.874 | 83. |
| C4BPB | NM_000716_at | NM_000716 | 1.871 | 84. |
| C4BPB | NM_001017364_at | NM_001017364 | 1.863 | 85. |
| C4BPB | NM_001017365_at | NM_001017365 | 1.863 | 86. |
| C5orf14 | NM_024715_at | NM_024715 | 1.612 | 87. |
| C5orf20 | NM_130848_at | NM_130848 | 1.688 | 88. |
| C6orf136 | NM_145029_at | NM_145029 | 0.586 | 89. |
| C7orf10 | NM_024728_at | NM_024728 | 0.547 | 90. |
| C9orf72 | NM_018325_at | NM_018325 | 1.535 | 91. |
| CALCRL | NM_005795_at | NM_005795 | 1.725 | 92. |
| CALD1 | NM_033138_at | NM_033138 | 1.832 | 93. |
| CALD1 | NM_004342_at | NM_004342 | 1.831 | 94. |
| CALD1 | NM_033157_at | NM_033157 | 1.83 | 95. |
| CALD1 | NM_033139_at | NM_033139 | 1.717 | 96. |
| CALD1 | NM_033140_at | NM_033140 | 1.716 | 97. |
| CAPN3 | NM_173090_at | NM_173090 | 0.622 | 98. |
| CAPN3 | NM_173089_at | NM_173089 | 0.622 | 99. |
| CAPN3 | NM_173087_at | NM_173087 | 0.618 | 100. |
| CAPN3 | NM_173088_at | NM_173088 | 0.618 | 101. |
| CAPN3 | NM_212464_at | NM_212464 | 0.618 | 102. |
| CAPN3 | NM_000070_at | NM_000070 | 0.617 | 103. |
| CAPN3 | NM_212465_at | NM_212465 | 0.617 | 104. |
| CAPN3 | NM_212467_at | NM_212467 | 0.617 | 105. |
| CAPN3 | NM_024344_at | NM_024344 | 0.617 | 106. |
| CARD15 | NM_022162_at | NM_022162 | 2.375 | 107. |
| CARD6 | NM_032587_at | NM_032587 | 1.708 | 108. |
| CBFA2T3 | NM_175931_at | NM_175931 | 1.525 | 109. |
| CBFA2T3 | NM_005187_at | NM_005187 | 1.517 | 110. |
| CBR3 | NM_001236_at | NM_001236 | 1.581 | 111. |
| CCLI1 | NM_002986_at | NM_002986 | 3.005 | 112. |
| CCL2 | NM_002982_at | NM_002982 | 3.652 | 113. |
| CCL20 | NM_004591_at | NM_004591 | 2.091 | 114. |
| CCL8 | NM_005623_at | NM_005623 | 3.269 | 115. |
| CCPG1 | NM_004748_at | NM_004748 | 1.792 | 116. |
| CCPG1 | NM_020739_at | NM_020739 | 1.791 | 117. |
| CD14 | NM_001040021_at | NM_001040021 | 1.742 | 118. |
| CD14 | NM_000591_at | NM_000591 | 1.742 | 119. |
| CD300A | NM_007261_at | NM_007261 | 1.816 | 120. |
| CD300LF | NM_139018_at | NM_139018 | 1.893 | 121. |
| CD38 | NM_001775_at | NM_001775 | 2.373 | 122. |
| CD74 | NM_004355_at | NM_004355 | 2.276 | 123. |
| CD74 | NM_001025158_at | NM_001025158 | 2.276 | 124. |
| CD74 | NM_001025159_at | NM_001025159 | 2.264 | 125. |
| CD81 | NM_004356_at | NM_004356 | 1.686 | 126. |
| CD86 | NM_175862_at | NM_175862 | 2.043 | 127. |
| CD86 | NM_006889_at | NM_006889 | 2.028 | 128. |
| CDH11 | NM_001797_at | NM_001797 | 2.714 | 129. |
| CDH13 | NM_001257_at | NM_001257 | 1.787 | 130. |
| CECR1 | NM_017424_at | NM_017424 | 2.429 | 131. |
| CECR1 | NM_177405_at | NM_177405 | 2.428 | 132. |
| CFI | NM_000204_at | NM_000204 | 2.091 | 133. |
| CFL2 | NM_138638_at | NM_138638 | 1.528 | 134. |
| CGNL1 | NM_032866_at | NM_032866 | 1.633 | 135. |
| CH25H | NM_003956_at | NM_003956 | 3.471 | 136. |
| CHI3L1 | NM_001276_at | NM_001276 | 5.374 | 137. |
| CHKB | NM_152253_at | NM_152253 | 0.615 | 138. |
| CHST11 | NM_018413_at | NM_018413 | 1.726 | 139. |
| CHST13 | NM_152889_at | NM_152889 | 0.55 | 140. |
| CHST2 | NM_004267_at | NM_004267 | 2.509 | 141. |
| CHSY1 | NM_014918_at | NM_014918 | 1.686 | 142. |
| CLDN15 | NM_014343_at | NM_014343 | 0.641 | 143. |
| CLEC10A | NM_006344_at | NM_006344 | 2.546 | 144. |
| CLEC10A | NM_182906_at | NM_182906 | 2.539 | 145. |
| CLEC4A | NM_194447_at | NM_194447 | 2.471 | 146. |
| CLEC4A | NM_194448_at | NM_194448 | 2.47 | 147. |
| CLEC4A | NM_194450_at | NM_194450 | 2.412 | 148. |
| CLEC4A | NM_016184_at | NM_016184 | 2.41 | 149. |
| CLEC7A | NM_197950_at | NM_197950 | 1.976 | 150. |
| CLEC7A | NM_197954_at | NM_197954 | 1.908 | 151. |
| CLEC7A | NM_022570_at | NM_022570 | 1.826 | 152. |
| CLEC7A | NM_197947_at | NM_197947 | 1.826 | 153. |
| CLEC7A | NM_197949_at | NM_197949 | 1.825 | 154. |
| CLEC7A | NM_197948_at | NM_197948 | 1.823 | 155. |
| CMAH | NR_002174_at | NR_002174 | 1.654 | 156. |
| CMKOR1 | NM_020311_at | NM_020311 | 2.054 | 157. |
| COL15A1 | NM_001855_at | NM_001855 | 1.981 | 158. |
| COL1A2 | NM_000089_at | NM_000089 | 2.069 | 159. |
| COL3A1 | NM_000090_at | NM_000090 | 1.8 | 160. |
| COL4A1 | NM_001845_at | NM_001845 | 1.81 | 161. |
| COL5A1 | NM_000093_at | NM_000093 | 1.664 | 162. |
| COL5A2 | NM_000393_at | NM_000393 | 1.853 | 163. |
| COL6A2 | NM_001849_at | NM_001849 | 2.069 | 164. |
| COL6A3 | NM_004369_at | NM_004369 | 2.388 | 165. |
| COL6A3 | NM_057164_at | NM_057164 | 2.386 | 166. |
| COL6A3 | NM_057165_at | NM_057165 | 2.386 | 167. |
| COL6A3 | NM_057167_at | NM_057167 | 2.386 | 168. |
| COL6A3 | NM_057166_at | NM_057166 | 2.385 | 169. |
| COLEC11 | NM_024027_at | NM_024027 | 0.652 | 170. |
| CPA3 | NM_001870_at | NM_001870 | 5.314 | 171. |
| CPT1B | NM_152247_at | NM_152247 | 0.615 | 172. |
| CPT1B | NM_152246_at | NM_152246 | 0.57 | 173. |
| CPT1B | NM_004377_at | NM_004377 | 0.561 | 174. |
| CPT1B | NM_152245_at | NM_152245 | 0.56 | 175. |
| CPVL | NM_019029_at | NM_019029 | 4.537 | 176. |
| CPVL | NM_031311_at | NM_031311 | 4.536 | 177. |
| CRISPLD2 | NM_031476_at | NM_031476 | 2.115 | 178. |
| CRYL1 | NM_015974_at | NM_015974 | 0.566 | 179. |
| CSF1R | NM_005211_at | NM_005211 | 2.035 | 180. |
| CSF2RA | NM_172247_at | NM_172247 | 1.958 | 181. |
| CSF2RA | NM_172245_at | NM_172245 | 1.94 | 182. |
| CSF2RA | NM_006140_at | NM_006140 | 1.931 | 183. |
| CSF2RA | NM_172246_at | NM_172246 | 1.897 | 184. |
| CSF2RA | NM_172248_at | NM_172248 | 1.621 | 185. |
| CSPG2 | NM_004385_at | NM_004385 | 2.834 | 186. |
| CTGF | NM_001901_at | NM_001901 | 2.021 | 187. |
| CTHRC1 | NM_138455_at | NM_138455 | 2.914 | 188. |
| CTSC | NM_148170_at | NM_148170 | 2.289 | 189. |
| CTSC | NM_001814_at | NM_001814 | 1.985 | 190. |
| CTSK | NM_000396_at | NM_000396 | 1.901 | 191. |
| CTSO | NM_001334_at | NM_001334 | 1.533 | 192. |
| CX3CR1 | NM_001337_at | NM_001337 | 2.373 | 193. |
| CXCL1 | NM_001511_at | NM_001511 | 6.583 | 194. |
| CXCL10 | NM_001565_at | NM_001565 | 4.095 | 195. |
| CXCL11 | NM_005409_at | NM_005409 | 5.809 | 196. |
| CXCL12 | NM_000609_at | NM_000609 | 1.673 | 197. |
| CXCL2 | NM_002089_at | NM_002089 | 3.404 | 198. |
| CXCL3 | NM_002090_at | NM_002090 | 3.087 | 199. |
| CXCL5 | NM_002994_at | NM_002994 | 4.465 | 200. |
| CXCL6 | NM_002993_at | NM_002993 | 5.086 | 201. |
| CXCL9 | NM_002416_at | NM_002416 | 6.414 | 202. |
| CYP27A1 | NM_000784_at | NM_000784 | 0.66 | 203. |
| CYP2C18 | NM_000772_at | NM_000772 | 0.436 | 204. |
| CYP2C9 | NM_000771_at | NM_000771 | 0.285 | 205. |
| CYP4F12 | NM_023944_at | NM_023944 | 0.55 | 206. |
| CYP4F2 | NM_001082_at | NM_001082 | 0.499 | 207. |
| CYP4X1 | NM_178033_at | NM_178033 | 1.569 | 208. |
| CYR61 | NM_001554_at | NM_001554 | 3.992 | 209. |
| DDAH2 | NM_013974_at | NM_013974 | 0.529 | 210. |
| DEGS1 | NM_144780_at | NM_144780 | 1.84 | 211. |
| DEGS1 | NM_003676_at | NM_003676 | 1.836 | 212. |
| DEPDC7 | NM_139160_at | NM_139160 | 0.436 | 213. |
| DFNA5 | NM_004403_at | NM_004403 | 1.573 | 214. |
| DNAJC12 | NM_021800_at | NM_021800 | 1.865 | 215. |
| DOCK4 | NM_014705_at | NM_014705 | 2.058 | 216. |
| DQX1 | NM_133637_at | NM_133637 | 0.471 | 217. |
| DUOX2 | NM_014080_at | NM_014080 | 14.74 | 218. |
| DUOXA2 | NM_207581_at | NM_207581 | 2.53 | 219. |
| DUSP4 | NM_001394_at | NM_001394 | 1.507 | 220. |
| DUSP4 | NM_057158_at | NM_057158 | 1.504 | 221. |
| EAF2 | NM_018456_at | NM_018456 | 2.034 | 222. |
| EDN1 | NM_001955_at | NM_001955 | 0.517 | 223. |
| EGR2 | NM_000399_at | NM_000399 | 1.842 | 224. |
| EIF2AK4 | NM_001013703_at | NM_001013703 | 1.536 | 225. |
| ELL2 | NM_012081_at | NM_012081 | 2.324 | 226. |
| ELL3 | NM_025165_at | NM_025165 | 0.615 | 227. |
| EML1 | NM_001008707_at | NM_001008707 | 1.501 | 228. |
| EMP3 | NM_001425_at | NM_001425 | 2.027 | 229. |
| EMR2 | NM_152920_at | NM_152920 | 2.119 | 230. |
| EMR2 | NM_152918_at | NM_152918 | 2.117 | 231. |
| EMR2 | NM_152919_at | NM_152919 | 2.117 | 232. |
| EMR2 | NM_013447_at | NM_013447 | 2.11 | 233. |
| EMR2 | NM_152917_at | NM_152917 | 2.11 | 234. |
| EMR2 | NM_152921_at | NM_152921 | 2.108 | 235. |
| EMR2 | NM_152916_at | NM_152916 | 2.107 | 236. |
| ENTPD1 | NM_001776_at | NM_001776 | 2.514 | 237. |
| ENTPD5 | NM_001249_at | NM_001249 | 0.439 | 238. |
| ERO1LB | NM_019891_at | NM_019891 | 1.711 | 239. |
| ETNK1 | NM_018638_at | NM_018638 | 0.455 | 240. |
| EVA1 | NM_144765_at | NM_144765 | 0.628 | 241. |
| F2R | NM_001992_at | NM_001992 | 1.887 | 242. |
| FADS1 | NM_013402_at | NM_013402 | 1.925 | 243. |
| FAM46C | NM_017709_at | NM_017709 | 2.071 | 244. |
| FAM73B | NM_032809_at | NM_032809 | 0.626 | 245. |
| FAM89A | NM_198552_at | NM_198552 | 1.539 | 246. |
| FAM92A1 | XM_943013_at | XM_943013 | 1.54 | 247. |
| FBLN1 | NM_001996_at | NM_001996 | 1.886 | 248. |
| FBLN5 | NM_006329_at | NM_006329 | 1.725 | 249. |
| FBN1 | NM_000138_at | NM_000138 | 1.79 | 250. |
| FBXO6 | NM_018438_at | NM_018438 | 1.888 | 251. |
| FCER1G | NM_004106_at | NM_004106 | 3.497 | 252. |
| FCGR3B | NM_000570_at | NM_000570 | 3.507 | 253. |
| FGR | NM_005248_at | NM_005248 | 2.047 | 254. |
| FKBP11 | NM_016594_at | NM_016594 | 2.848 | 255. |
| FMOD | NM_002023_at | NM_002023 | 1.724 | 256. |
| FN1 | NM_212474_at | NM_212474 | 1.867 | 257. |
| FN1 | NM_212475_at | NM_212475 | 1.867 | 258. |
| FN1 | NM_212478_at | NM_212478 | 1.867 | 259. |
| FN1 | NM_212476_at | NM_212476 | 1.866 | 260. |
| FN1 | NM_212482_at | NM_212482 | 1.865 | 261. |
| FN1 | NM_002026_at | NM_002026 | 1.858 | 262. |
| FOXF2 | NM_001452_at | NM_001452 | 1.989 | 263. |
| FSTL1 | NM_007085_at | NM_007085 | 1.749 | 264. |
| FUT8 | NM_178157_at | NM_178157 | 1.651 | 265. |
| FUT8 | NM_178154_at | NM_178154 | 1.651 | 266. |
| FUT8 | NM_178156_at | NM_178156 | 1.65 | 267. |
| FUT8 | NM_178155_at | NM_178155 | 1.65 | 268. |
| FUT8 | NM_004480_at | NM_004480 | 1.648 | 269. |
| FZD2 | NM_001466_at | NM_001466 | 1.963 | 270. |
| FZD3 | NM_017412_at | NM_017412 | 1.713 | 271. |
| GALNT5 | NM_014568_at | NM_014568 | 1.655 | 272. |
| GBP1 | NM_002053_at | NM_002053 | 2.671 | 273. |
| GBP5 | NM_052942_at | NM_052942 | 4.008 | 274. |
| GCNT2 | NM_001491_at | NM_001491 | 0.536 | 275. |
| GCNT2 | NM_145655_at | NM_145655 | 0.535 | 276. |
| GCNT2 | NM_145649_at | NM_145649 | 0.535 | 277. |
| GDPD3 | NM_024307_at | NM_024307 | 0.565 | 278. |
| GDPD3 | NM_001031718_at | NM_001031718 | 0.564 | 279. |
| GEM | NM_005261_at | NM_005261 | 1.669 | 280. |
| GEM | NM_181702_at | NM_181702 | 1.666 | 281. |
| GGT1 | NM_005265_at | NM_005265 | 0.457 | 282. |
| GGT1 | NM_001032364_at | NM_001032364 | 0.455 | 283. |
| GGT1 | NM_013430_at | NM_013430 | 0.455 | 284. |
| GGT1 | NM_001032365_at | NM_001032365 | 0.455 | 285. |
| GGT2 | NM_002058_at | NM_002058 | 0.447 | 286. |
| GGTL4 | NM_080839_at | NM_080839 | 0.439 | 287. |
| GGTL4 | NM_199127_at | NM_199127 | 0.438 | 288. |
| GGTLA4 | NM_178311_at | NM_178311 | 0.616 | 289. |
| GGTLA4 | NM_178312_at | NM_178312 | 0.615 | 290. |
| GGTLA4 | NM_080920_at | NM_080920 | 0.613 | 291. |
| GLCCI1 | NM_138426_at | NM_138426 | 1.816 | 292. |
| GLS | NM_014905_at | NM_014905 | 0.546 | 293. |
| GNA14 | NM_004297_at | NM_004297 | 2.074 | 294. |
| GNA15 | NM_002068_at | NM_002068 | 2.036 | 295. |
| GOLGA2L1 | NM_017600_at | NM_017600 | 0.624 | 296. |
| GOLT1A | NM_198447_at | NM_198447 | 0.455 | 297. |
| GPR109B | NM_006018_at | NM_006018 | 4.219 | 298. |
| GPR124 | NM_032777_at | NM_032777 | 1.577 | 299. |
| GPR137B | NM_003272_at | NM_003272 | 2.101 | 300. |
| GPR37 | NM_005302_at | NM_005302 | 1.771 | 301. |
| GSTA1 | NM_145740_at | NM_145740 | 0.242 | 302. |
| HAS2 | NM_005328_at | NM_005328 | 2.046 | 303. |
| HAVCR1 | NM_012206_at | NM_012206 | 0.654 | 304. |
| HBA1 | NM_000558_at | NM_000558 | 2.245 | 305. |
| HBA2 | NM_000517_at | NM_000517 | 1.903 | 306. |
| HBB | NM_000518_at | NM_000518 | 2.965 | 307. |
| HCK | NM_002110_at | NM_002110 | 2.218 | 308. |
| HDC | NM_002112_at | NM_002112 | 1.593 | 309. |
| HLA-DPA1 | NM_033554_at | NM_033554 | 2.78 | 310. |
| HLA-DQB1 | NM_002123_at | NM_002123 | 1.764 | 311. |
| HLA-DRA | NM_019111_at | NM_019111 | 2.398 | 312. |
| HLA-DRB1 | NM_002124_at | NM_002124 | 1.843 | 313. |
| HLA-DRB3 | NM_022555_at | NM_022555 | 1.858 | 314. |
| HLA-DRB6 | NR_001298_at | NR_001298 | 1.753 | 315. |
| HNRPL | NM_001533_at | NM_001533 | 0.559 | 316. |
| HNRPL | NM_001005335_at | NM_001005335 | 0.558 | 317. |
| HOXB5 | NM_002147_at | NM_002147 | 0.599 | 318. |
| HOXB6 | NM_018952_at | NM_018952 | 0.643 | 319. |
| HSD11B1 | NM_181755_at | NM_181755 | 2.776 | 320. |
| HSD11B1 | NM_005525_at | NM_005525 | 2.764 | 321. |
| HSD17B2 | NM_002153_at | NM_002153 | 0.309 | 322. |
| HSD17B6 | NM_003725_at | NM_003725 | 1.629 | 323. |
| HSD3B1 | NM_000862_at | NM_000862 | 0.522 | 324. |
| HSD3B2 | NM_000198_at | NM_000198 | 0.151 | 325. |
| HSPB1 | NM_001540_at | NM_001540 | 0.6 | 326. |
| HTRA1 | NM_002775_at | NM_002775 | 1.513 | 327. |
| ICAM1 | NM_000201_at | NM_000201 | 1.76 | 328. |
| IFI30 | NM_006332_at | NM_006332 | 2.189 | 329. |
| IGFBP7 | NM_001553_at | NM_001553 | 1.677 | 330. |
| IGSF6 | NM_005849_at | NM_005849 | 2.666 | 331. |
| IL10RA | NM_001558_at | NM_001558 | 2.181 | 332. |
| IL12RB1 | NM_153701_at | NM_153701 | 1.642 | 333. |
| IL1B | NM_000576_at | NM_000576 | 3.534 | 334. |
| IL2RB | NM_000878_at | NM_000878 | 2.002 | 335. |
| IL8 | NM_000584_at | NM_000584 | 4.708 | 336. |
| IL8RB | NM_001557_at | NM_001557 | 2.26 | 337. |
| INDO | NM_002164_at | NM_002164 | 4.548 | 338. |
| IRF4 | NM_002460_at | NM_002460 | 1.717 | 339. |
| IRS1 | NM_005544_at | NM_005544 | 2.14 | 340. |
| ISL1 | NM_002202_at | NM_002202 | 1.904 | 341. |
| ITGB2 | NM_000211_at | NM_000211 | 2.335 | 342. |
| ITPKA | NM_002220_at | NM_002220 | 0.497 | 343. |
| JAK2 | NM_004972_at | NM_004972 | 1.703 | 344. |
| KCTD12 | NM_138444_at | NM_138444 | 1.666 | 345. |
| KCTD14 | NM_023930_at | NM_023930 | 1.547 | 346. |
| KDELR3 | NM_006855_at | NM_006855 | 2.278 | 347. |
| KIAA0125 | NM_014792_at | NM_014792 | 2.828 | 348. |
| KIAA0367 | NM_015225_at | NM_015225 | 1.593 | 349. |
| KIT | NM_000222_at | NM_000222 | 2.567 | 350. |
| KLF8 | NM_007250_at | NM_007250 | 0.451 | 351. |
| KLKB1 | NM_000892_at | NM_000892 | 0.556 | 352. |
| KRT12 | NM_000223_at | NM_000223 | 0.268 | 353. |
| LAMC1 | NM_002293_at | NM_002293 | 1.723 | 354. |
| LAX1 | NM_017773_at | NM_017773 | 2.229 | 355. |
| LCN2 | NM_005564_at | NM_005564 | 2.882 | 356. |
| LCP2 | NM_005565_at | NM_005565 | 2.458 | 357. |
| LDHD | NM_153486_at | NM_153486 | 0.448 | 358. |
| LDHD | NM_194436_at | NM_194436 | 0.447 | 359. |
| LETM1 | NM_012318_at | NM_012318 | 0.653 | 360. |
| LHFP | NM_005780_at | NM_005780 | 1.94 | 361. |
| LIMS1 | NM_004987_at | NM_004987 | 1.52 | 362. |
| LIPC | NM_000236_at | NM_000236 | 0.56 | 363. |
| LOXL1 | NM_005576_at | NM_005576 | 2.022 | 364. |
| LPHN2 | NM_012302_at | NM_012302 | 2.057 | 365. |
| LRRK2 | NM_198578_at | NM_198578 | 1.948 | 366. |
| LUM | NM_002345_at | NM_002345 | 3.195 | 367. |
| LYN | NM_002350_at | NM_002350 | 1.634 | 368. |
| LYSMD2 | NM_153374_at | NM_153374 | 1.732 | 369. |
| MAGEH1 | NM_014061_at | NM_014061 | 1.757 | 370. |
| MAP3K5 | NM_005923_at | NM_005923 | 1.523 | 371. |
| MARVELD3 | NM_001017967_at | NM_001017967 | 0.568 | 372. |
| MCOLN2 | NM_153259_at | NM_153259 | 0.42 | 373. |
| MDS1 | NM_004991_at | NM_004991 | 0.533 | 374. |
| ME3 | NM_006680_at | NM_006680 | 0.528 | 375. |
| ME3 | NM_001014811_at | NM_001014811 | 0.527 | 376. |
| MEOX1 | NM_004527_at | NM_004527 | 1.857 | 377. |
| MEOX1 | NM_001040002_at | NM_001040002 | 1.85 | 378. |
| MEOX1 | NM_013999_at | NM_013999 | 1.842 | 379. |
| MEP1B | NM_005925_at | NM_005925 | 0.122 | 380. |
| METTL7B | NM_152637_at | NM_152637 | 0.483 | 381. |
| MFAP4 | NM_002404_at | NM_002404 | 1.954 | 382. |
| MICAL3 | XM_943874_at | XM_943874 | 0.611 | 383. |
| MITF | NM_006722_at | NM_006722 | 1.779 | 384. |
| MITF | NM_198178_at | NM_198178 | 1.777 | 385. |
| MITF | NM_198177_at | NM_198177 | 1.777 | 386. |
| MITF | NM_198158_at | NM_198158 | 1.773 | 387. |
| MITF | NM_198159_at | NM_198159 | 1.773 | 388. |
| MITF | NM_000248_at | NM_000248 | 1.772 | 389. |
| MMP1 | NM_002421_at | NM_002421 | 6.11 | 390. |
| MMP10 | NM_002425_at | NM_002425 | 3.311 | 391. |
| MMP12 | NM_002426_at | NM_002426 | 4.267 | 392. |
| MMP2 | NM_004530_at | NM_004530 | 2.249 | 393. |
| MMP3 | NM_002422_at | NM_002422 | 10.8 | 394. |
| MMP7 | NM_002423_at | NM_002423 | 2.139 | 395. |
| MNDA | NM_002432_at | NM_002432 | 4.425 | 396. |
| MOCS1 | NM_138928_at | NM_138928 | 0.522 | 397. |
| MOCS1 | NM_005943_at | NM_005943 | 0.521 | 398. |
| MOCS1 | NM_005942_at | NM_005942 | 0.521 | 399. |
| MOGAT2 | NM_025098_at | NM_025098 | 0.57 | 400. |
| MORC4 | NM_024657_at | NM_024657 | 1.662 | 401. |
| MPST | NM_001013440_at | NM_001013440 | 0.613 | 402. |
| MPST | NM_021126_at | NM_021126 | 0.612 | 403. |
| MPST | NM_001013436_at | NM_001013436 | 0.612 | 404. |
| MRGPRF | NM_145015_at | NM_145015 | 1.8 | 405. |
| MS4A2 | NM_000139_at | NM_000139 | 1.934 | 406. |
| MTHFD2 | NM_006636_at | NM_006636 | 1.928 | 407. |
| MTHFD2 | NM_001040409_at | NM_001040409 | 1.927 | 408. |
| MTMR11 | NM_181873_at | NM_181873 | 0.579 | 409. |
| MXRA5 | NM_015419_at | NM_015419 | 1.931 | 410. |
| MYBL1 | XM_938064_at | XM_938064 | 0.659 | 411. |
| MYBL1 | XM_034274_at | XM_034274 | 0.658 | 412. |
| MYH10 | NM_005964_at | NM_005964 | 1.904 | 413. |
| MYL5 | NM_002477_at | NM_002477 | 0.441 | 414. |
| NCF2 | NM_000433_at | NM_000433 | 2.801 | 415. |
| NEIL1 | NM_024608_at | NM_024608 | 0.59 | 416. |
| NID1 | NM_002508_at | NM_002508 | 1.617 | 417. |
| NID2 | NM_007361_at | NM_007361 | 1.774 | 418. |
| NINJ2 | NM_016533_at | NM_016533 | 1.502 | 419. |
| NMU | NM_006681_at | NM_006681 | 1.518 | 420. |
| NOS2A | NM_153292_at | NM_153292 | 2.877 | 421. |
| NOS2A | NM_000625_at | NM_000625 | 2.874 | 422. |
| NOX1 | NM_013955_at | NM_013955 | 1.73 | 423. |
| NPHP3 | NM_153240_at | NM_153240 | 0.584 | 424. |
| NQO2 | NM_000904_at | NM_000904 | 2.038 | 425. |
| NR4A2 | NM_173172_at | NM_173172 | 1.758 | 426. |
| NR4A2 | NM_173171_at | NM_173171 | 1.758 | 427. |
| NR4A2 | NM_173173_at | NM_173173 | 1.758 | 428. |
| NR4A2 | NM_006186_at | NM_006186 | 1.757 | 429. |
| NUCB2 | NM_005013_at | NM_005013 | 2.403 | 430. |
| OASL | NM_003733_at | NM_003733 | 0.439 | 431. |
| OASL | NM_198213_at | NM_198213 | 0.439 | 432. |
| OLFM1 | NM_006334_at | NM_006334 | 1.65 | 433. |
| OLFML3 | NM_020190_at | NM_020190 | 2.075 | 434. |
| OSMR | NM_003999_at | NM_003999 | 1.561 | 435. |
| OTUD3 | XM_375697_at | XM_375697 | 0.666 | 436. |
| P2RY13 | NM_176894_at | NM_176894 | 3.812 | 437. |
| P2RY13 | NM_023914_at | NM_023914 | 3.811 | 438. |
| PAM | NM_000919_at | NM_000919 | 1.713 | 439. |
| PAM | NM_138766_at | NM_138766 | 1.713 | 440. |
| PAM | NM_138822_at | NM_138822 | 1.712 | 441. |
| PAM | NM_138821_at | NM_138821 | 1.712 | 442. |
| PARP8 | NM_024615_at | NM_024615 | 1.845 | 443. |
| PCOLCE | NM_002593_at | NM_002593 | 1.979 | 444. |
| PCSK1 | NM_000439_at | NM_000439 | 3.694 | 445. |
| PDE4B | NM_001037340_at | NM_001037340 | 3.385 | 446. |
| PDE4B | NM_001037341_at | NM_001037341 | 3.385 | 447. |
| PDE4B | NM_002600_at | NM_002600 | 3.382 | 448. |
| PDE4B | NM_001037339_at | NM_001037339 | 3.381 | 449. |
| PDE6A | NM_000440_at | NM_000440 | 0.397 | 450. |
| PDLIM3 | NM_014476_at | NM_014476 | 1.673 | 451. |
| PDZK1IP1 | NM_005764_at | NM_005764 | 1.938 | 452. |
| PECAM1 | NM_000442_at | NM_000442 | 1.674 | 453. |
| PHLDA1 | NM_007350_at | NM_007350 | 1.807 | 454. |
| PIM2 | NM_006875_at | NM_006875 | 2.422 | 455. |
| PITX2 | NM_153426_at | NM_153426 | 0.177 | 456. |
| PITX2 | NM_000325_at | NM_000325 | 0.177 | 457. |
| PITX2 | NM_153427_at | NM_153427 | 0.177 | 458. |
| PJA1 | NM_001032396_at | NM_001032396 | 1.774 | 459. |
| PJA1 | NM_145119_at | NM_145119 | 1.773 | 460. |
| PJA1 | NM_022368_at | NM_022368 | 1.771 | 461. |
| PLA1A | NM_015900_at | NM_015900 | 2.31 | 462. |
| PLAU | NM_002658_at | NM_002658 | 2.193 | 463. |
| PLEKHC1 | NM_006832_at | NM_006832 | 1.588 | 464. |
| PLEKHG6 | NM_018173_at | NM_018173 | 0.549 | 465. |
| PLEKHO1 | NM_016274_at | NM_016274 | 1.983 | 466. |
| PLIN | NM_002666_at | NM_002666 | 0.59 | 467. |
| PLS3 | NM_005032_at | NM_005032 | 1.544 | 468. |
| PRAP1 | NM_145202_at | NM_145202 | 0.291 | 469. |
| PRDM1 | NM_182907_at | NM_182907 | 1.729 | 470. |
| PRDM1 | NM_001198_at | NM_001198 | 1.728 | 471. |
| PRDX4 | NM_006406_at | NM_006406 | 2.184 | 472. |
| PRKAR2B | NM_002736_at | NM_002736 | 2.26 | 473. |
| PRKD1 | NM_002742_at | NM_002742 | 1.548 | 474. |
| PROCR | NM_006404_at | NM_006404 | 2.195 | 475. |
| PROK2 | NM_021935_at | NM_021935 | 2.72 | 476. |
| PROS1 | NM_000313_at | NM_000313 | 1.69 | 477. |
| PSAT1 | NM_058179_at | NM_058179 | 2.612 | 478. |
| PSAT1 | NM_021154_at | NM_021154 | 2.603 | 479. |
| PSTPIP2 | NM_024430_at | NM_024430 | 2.242 | 480. |
| PTGDR | NM_000953_at | NM_000953 | 0.651 | 481. |
| PTGS1 | NM_080591_at | NM_080591 | 1.854 | 482. |
| PTGS1 | NM_000962_at | NM_000962 | 1.85 | 483. |
| PTGS2 | NM_000963_at | NM_000963 | 2.847 | 484. |
| PTPN13 | NM_080683_at | NM_080683 | 1.748 | 485. |
| PTPN13 | NM_080684_at | NM_080684 | 1.747 | 486. |
| PTPN13 | NM_080685_at | NM_080685 | 1.746 | 487. |
| PTPN13 | NM_006264_at | NM_006264 | 1.731 | 488. |
| PTPRG | NM_002841_at | NM_002841 | 1.743 | 489. |
| RAB23 | NM_016277_at | NM_016277 | 1.615 | 490. |
| RAB31 | NM_006868_at | NM_006868 | 2.108 | 491. |
| RAB34 | NM_031934_at | NM_031934 | 1.693 | 492. |
| RAB38 | NM_022337_at | NM_022337 | 1.725 | 493. |
| RAB3IP | NM_001024647_at | NM_001024647 | 0.627 | 494. |
| RAB3IP | NM_022456_at | NM_022456 | 0.623 | 495. |
| RAB3IP | NM_175623_at | NM_175623 | 0.621 | 496. |
| RAB3IP | NM_175625_at | NM_175625 | 0.587 | 497. |
| RAB3IP | NM_175624_at | NM_175624 | 0.587 | 498. |
| RAI2 | NM_021785_at | NM_021785 | 2.051 | 499. |
| RAPGEFL1 | NM_016339_at | NM_016339 | 0.495 | 500. |
| RARRES1 | NM_002888_at | NM_002888 | 1.782 | 501. |
| RARRES1 | NM_206963_at | NM_206963 | 1.729 | 502. |
| RBKS | NM_022128_at | NM_022128 | 0.547 | 503. |
| RBPMS | NM_001008712_at | NM_001008712 | 1.778 | 504. |
| RBPMS | NM_001008710_at | NM_001008710 | 1.624 | 505. |
| RBPMS | NM_001008711_at | NM_001008711 | 1.624 | 506. |
| RDH5 | NM_002905_at | NM_002905 | 0.614 | 507. |
| RECQL | NM_032941_at | NM_032941 | 1.605 | 508. |
| RECQL | NM_002907_at | NM_002907 | 1.593 | 509. |
| RGL1 | NM_015149_at | NM_015149 | 1.507 | 510. |
| RGS18 | NM_130782_at | NM_130782 | 2.5 | 511. |
| RGS2 | NM_002923_at | NM_002923 | 1.937 | 512. |
| RPA4 | NM_013347_at | NM_013347 | 0.515 | 513. |
| RTN1 | NM_021136_at | NM_021136 | 1.878 | 514. |
| RTN1 | NM_206852_at | NM_206852 | 1.877 | 515. |
| RTN1 | NM_206857_at | NM_206857 | 1.874 | 516. |
| S100A8 | NM_002964_at | NM_002964 | 5.423 | 517. |
| S100P | NM_005980_at | NM_005980 | 2.129 | 518. |
| SAMHD1 | NM_015474_at | NM_015474 | 1.923 | 519. |
| SCG2 | NM_003469_at | NM_003469 | 1.909 | 520. |
| SEC22C | NM_004206_at | NM_004206 | 1.591 | 521. |
| SEC24D | NM_014822_at | NM_014822 | 2.357 | 522. |
| SEMA4D | NM_006378_at | NM_006378 | 1.79 | 523. |
| SERPINA1 | NM_000295_at | NM_000295 | 1.917 | 524. |
| SERPINA1 | NM_001002236_at | NM_001002236 | 1.916 | 525. |
| SERPINA1 | NM_001002235_at | NM_001002235 | 1.916 | 526. |
| SERPINA5 | NM_000624_at | NM_000624 | 0.635 | 527. |
| SERPING1 | NM_000062_at | NM_000062 | 1.991 | 528. |
| SERPING1 | NM_001032295_at | NM_001032295 | 1.99 | 529. |
| SESTD1 | NM_178123_at | NM_178123 | 1.544 | 530. |
| SGK2 | NM_016276_at | NM_016276 | 0.399 | 531. |
| SGK2 | NM_170693_at | NM_170693 | 0.399 | 532. |
| SIGLECP3 | NR_002804_at | NR_002804 | 2.068 | 533. |
| SLAMF1 | NM_003037_at | NM_003037 | 1.827 | 534. |
| SLAMF7 | NM_021181_at | NM_021181 | 2.68 | 535. |
| SLAMF8 | NM_020125_at | NM_020125 | 2.361 | 536. |
| SLC10A2 | NM_000452_at | NM_000452 | 0.484 | 537. |
| SLC16A1 | NM_003051_at | NM_003051 | 0.41 | 538. |
| SLC16A5 | NM_004695_at | NM_004695 | 0.487 | 539. |
| SLC16A9 | NM_194298_at | NM_194298 | 0.253 | 540. |
| SLC20A1 | NM_005415_at | NM_005415 | 0.57 | 541. |
| SLC22A18AS | NM_007105_at | NM_007105 | 0.589 | 542. |
| SLC23A1 | NM_152685_at | NM_152685 | 0.316 | 543. |
| SLC23A1 | NM_005847_at | NM_005847 | 0.315 | 544. |
| SLC23A3 | NM_144712_at | NM_144712 | 0.294 | 545. |
| SLC24A3 | NM_020689_at | NM_020689 | 1.939 | 546. |
| SLC25A34 | NM_207348_at | NM_207348 | 0.498 | 547. |
| SLC31A2 | NM_001860_at | NM_001860 | 1.599 | 548. |
| SLC36A4 | NM_152313_at | NM_152313 | 1.797 | 549. |
| SLC39A5 | NM_173596_at | NM_173596 | 0.628 | 550. |
| SLC6A14 | NM_007231_at | NM_007231 | 8.39 | 551. |
| SLC6A4 | NM_001045_at | NM_001045 | 0.517 | 552. |
| SMOC2 | NM_022138_at | NM_022138 | 1.913 | 553. |
| SOAT1 | NM_003101_at | NM_003101 | 1.848 | 554. |
| SPDYA | NM_182756_at | NM_182756 | 0.547 | 555. |
| SPG20 | NM_015087_at | NM_015087 | 1.655 | 556. |
| SPINK4 | NM_014471_at | NM_014471 | 5.713 | 557. |
| SPIRE2 | NM_032451_at | NM_032451 | 0.565 | 558. |
| ST3GAL5 | NM_003896_at | NM_003896 | 1.815 | 559. |
| ST3GAL5 | NM_001042437_at | NM_001042437 | 1.805 | 560. |
| STCH | NM_006948_at | NM_006948 | 2.221 | 561. |
| SULF1 | NM_015170_at | NM_015170 | 1.865 | 562. |
| SULT1A2 | NM_001054_at | NM_001054 | 0.505 | 563. |
| SULT1A2 | NM_177528_at | NM_177528 | 0.505 | 564. |
| SULT1A3 | NM_177552_at | NM_177552 | 0.639 | 565. |
| SULT1A3 | NM_001017387_at | NM_001017387 | 0.638 | 566. |
| SULT1A4 | NM_001017390_at | NM_001017390 | 0.639 | 567. |
| SULT1A4 | NM_001017391_at | NM_001017391 | 0.638 | 568. |
| TBXAS1 | NM_001061_at | NM_001061 | 2.007 | 569. |
| TBXAS1 | NM_030984_at | NM_030984 | 1.995 | 570. |
| TDO2 | NM_005651_at | NM_005651 | 3.616 | 571. |
| TFPI2 | NM_006528_at | NM_006528 | 3.371 | 572. |
| TGFBI | NM_000358_at | NM_000358 | 2.092 | 573. |
| TICAM2 | NM_021649_at | NM_021649 | 1.616 | 574. |
| TIMP1 | NM_003254_at | NM_003254 | 2.893 | 575. |
| TINAG | NM_014464_at | NM_014464 | 0.498 | 576. |
| TLR1 | NM_003263_at | NM_003263 | 2.816 | 577. |
| TLR2 | NM_003264_at | NM_003264 | 2.436 | 578. |
| TLR7 | NM_016562_at | NM_016562 | 1.92 | 579. |
| TLR8 | NM_138636_at | NM_138636 | 2.912 | 580. |
| TM4SF20 | NM_024795_at | NM_024795 | 0.395 | 581. |
| TMCO3 | NM_017905_at | NM_017905 | 1.54 | 582. |
| TMED6 | NM_144676_at | NM_144676 | 0.286 | 583. |
| TMEM158 | NM_015444_at | NM_015444 | 2.778 | 584. |
| TMEM16F | NM_001025356_at | NM_001025356 | 1.69 | 585. |
| TMEM16J | NM_001012302_at | NM_001012302 | 0.535 | 586. |
| TMEM23 | NM_147156_at | NM_147156 | 1.924 | 587. |
| TMEM45A | NM_018004_at | NM_018004 | 2.496 | 588. |
| TNC | NM_002160_at | NM_002160 | 2.29 | 589. |
| TNFRSF17 | NM_001192_at | NM_001192 | 3.377 | 590. |
| TNFSF13B | NM_006573_at | NM_006573 | 2.249 | 591. |
| TNIP3 | NM_024873_at | NM_024873 | 1.655 | 592. |
| TNNC2 | NM_003279_at | NM_003279 | 0.638 | 593. |
| TOB2 | NM_016272_at | NM_016272 | 0.631 | 594. |
| TPST1 | NM_003596_at | NM_003596 | 1.508 | 595. |
| TPST2 | NM_003595_at | NM_003595 | 1.754 | 596. |
| TPST2 | NM_001008566_at | NM_001008566 | 1.752 | 597. |
| TRIM22 | NM_006074_at | NM_006074 | 2.031 | 598. |
| TRIM9 | NM_015163_at | NM_015163 | 0.615 | 599. |
| TRPM4 | NM_017636_at | NM_017636 | 0.595 | 600. |
| TRPV1 | NM_080705_at | NM_080705 | 0.521 | 601. |
| TRPV1 | NM_080706_at | NM_080706 | 0.519 | 602. |
| TRPV1 | NM_018727_at | NM_018727 | 0.516 | 603. |
| TSEN2 | NM_025265_at | NM_025265 | 0.581 | 604. |
| TUBB6 | NM_032525_at | NM_032525 | 1.777 | 605. |
| TUSC3 | NM_178234_at | NM_178234 | 2.835 | 606. |
| TUSC3 | NM_006765_at | NM_006765 | 2.831 | 607. |
| TWIST2 | NM_057179_at | NM_057179 | 1.572 | 608. |
| TWSG1 | NM_020648_at | NM_020648 | 1.94 | 609. |
| TXNDC5 | NM_030810_at | NM_030810 | 2.318 | 610. |
| TXNDC5 | NM_022085_at | NM_022085 | 2.318 | 611. |
| TYROBP | NM_198125_at | NM_198125 | 2.279 | 612. |
| TYROBP | NM_003332_at | NM_003332 | 2.279 | 613. |
| UCP2 | NM_003355_at | NM_003355 | 1.921 | 614. |
| VAV1 | NM_005428_at | NM_005428 | 1.619 | 615. |
| VEGFC | NM_005429_at | NM_005429 | 1.872 | 616. |
| VNN1 | NM_004666_at | NM_004666 | 2.398 | 617. |
| WARS | NM_173701_at | NM_173701 | 2.382 | 618. |
| WARS | NM_004184_at | NM_004184 | 2.38 | 619. |
| WARS | NM_213645_at | NM_213645 | 2.379 | 620. |
| WARS | NM_213646_at | NM_213646 | 2.378 | 621. |
| WDR41 | NM_018268_at | NM_018268 | 1.774 | 622. |
| WDR78 | NM_024763_at | NM_024763 | 0.55 | 623. |
| WNT5A | NM_003392_at | NM_003392 | 2.709 | 624. |
| XBP1 | NM_005080_at | NM_005080 | 1.899 | 625. |
| XKR4 | NM_052898_at | NM_052898 | 0.543 | 626. |
| YBX2 | NM_015982_at | NM_015982 | 0.518 | 627. |
| ZC3H12A | NM_025079_at | NM_025079 | 1.905 | 628. |
| ZFPM2 | NM_012082_at | NM_012082 | 1.795 | 629. |
| ZNF137 | NM_003438_at | NM_003438 | 0.643 | 630. |
| ZNF575 | NM_174945_at | NM_174945 | 0.554 | 631. |
| ZNF789 | NM_213603_at | NM_213603 | 0.57 | 632. |
| | XM_940819_at | XM_940819 | 6.106 | 633. |
| | XM_940060_at | XM_940060 | 4.181 | 634. |
| | NM_001010919_at | NM_001010919 | 3.954 | 635. |
| | XM_372952_at | XM_372952 | 3.389 | 636. |
| | NM_001008397_at | NM_001008397 | 3.388 | 637. |
| | XM_930497_at | XM_930497 | 3.262 | 638. |
| | XM_938704_at | XM_938704 | 3.26 | 639. |
| | NM_001013618_at | NM_001013618 | 3.215 | 640. |
| | NM_001040077_at | NM_001040077 | 2.978 | 641. |
| | XM_939071_at | XM_939071 | 2.892 | 642. |
| | XM_943820_at | XM_943820 | 2.705 | 643. |
| | XM_943825_at | XM_943825 | 2.705 | 644. |
| | XM_943822_at | XM_943822 | 2.703 | 645. |
| | XM_935086_at | XM_935086 | 2.695 | 646. |
| | XM_935084_at | XM_935084 | 2.694 | 647. |
| | XM_935088_at | XM_935088 | 2.694 | 648. |
| | XM_930293_at | XM_930293 | 2.63 | 649. |
| | XM_936733_at | XM_936733 | 2.619 | 650. |
| | NM_020962_at | NM_020962 | 2.604 | 651. |
| | NM_201613_at | NM_201613 | 2.433 | 652. |
| | NM_201612_at | NM_201612 | 2.42 | 653. |
| | NM_016459_at | NM_016459 | 2.341 | 654. |
| | XM_926979_at | XM_926979 | 2.263 | 655. |
| | NM_015892_at | NM_015892 | 2.183 | 656. |
| | NM_018370_at | NM_018370 | 2.165 | 657. |
| | XM_942376_at | XM_942376 | 2.157 | 658. |
| | NM_080430_at | NM_080430 | 2.034 | 659. |
| | NM_001005410_at | NM_001005410 | 1.927 | 660. |
| | NM_052864_at | NM_052864 | 1.918 | 661. |
| | XM_941100_at | XM_941100 | 1.877 | 662. |
| | XM_932993_at | XM_932993 | 1.846 | 663. |
| | XM_943640_at | XM_943640 | 1.846 | 664. |
| | XM_940833_at | XM_940833 | 1.842 | 665. |
| | XM_944822_at | XM_944822 | 1.842 | 666. |
| | XR_001419_at | XR_001419 | 1.808 | 667. |
| | XR_000584_at | XR_000584 | 1.785 | 668. |
| | NM_007203_at | NM_007203 | 1.772 | 669. |
| | XM_946340_at | XM_946340 | 1.757 | 670. |
| | XM_946339_at | XM_946339 | 1.757 | 671. |
| | XM_942723_at | XM_942723 | 1.757 | 672. |
| | XM_933016_at | XM_933016 | 1.662 | 673. |
| | NM_001040075_at | NM_001040075 | 1.659 | 674. |
| | XM_945072_at | XM_945072 | 1.657 | 675. |
| | NM_016134_at | NM_016134 | 1.652 | 676. |
| | XM_931920_at | XM_931920 | 1.595 | 677. |
| | XM_943451_at | XM_943451 | 1.592 | 678. |
| | XM_931925_at | XM_931925 | 1.592 | 679. |
| | XM_943452_at | XM_943452 | 1.59 | 680. |
| | XM_943019_at | XM_943019 | 1.542 | 681. |
| | XM_936827_at | XM_936827 | 1.54 | 682. |
| | XM_931200_at | XM_931200 | 1.537 | 683. |
| | XM_931194_at | XM_931194 | 1.536 | 684. |
| | XM_926337_at | XM_926337 | 1.535 | 685. |
| | XM_943257_at | XM_943257 | 0.664 | 686. |
| | XM_943532_at | XM_943532 | 0.659 | 687. |
| | XM_933462_at | XM_933462 | 0.658 | 688. |
| | NM_145262_at | NM_145262 | 0.658 | 689. |
| | XM_926967_at | XM_926967 | 0.655 | 690. |
| | NM_152684_at | NM_152684 | 0.651 | 691. |
| | XM_936750_at | XM_936750 | 0.639 | 692. |
| | NM_207482_at | NM_207482 | 0.637 | 693. |
| | XM_940471_at | XM_940471 | 0.632 | 694. |
| | XM_496724_at | XM_496724 | 0.629 | 695. |
| | XM_926453_at | XM_926453 | 0.629 | 696. |
| | XM_944611_at | XM_944611 | 0.626 | 697. |
| | XM_944609_at | XM_944609 | 0.625 | 698. |
| | XM_944919_at | XM_944919 | 0.622 | 699. |
| | XM_932126_at | XM_932126 | 0.619 | 700. |
| | XM_943877_at | XM_943877 | 0.612 | 701. |
| | XM_931100_at | XM_931100 | 0.612 | 702. |
| | XM_931108_at | XM_931108 | 0.611 | 703. |
| | XM_938808_at | XM_938808 | 0.61 | 704. |
| | XM_926245_at | XM_926245 | 0.609 | 705. |
| | NM_173661_at | NM_173661 | 0.588 | 706. |
| | NM_025149_at | NM_025149 | 0.577 | 707. |
| | NM_153270_at | NM_153270 | 0.567 | 708. |
| | NM_015253_at | NM_015253 | 0.564 | 709. |
| | NM_001001704_at | NM_001001704 | 0.518 | 710. |
| | XM_940000_at | XM_940000 | 0.513 | 711. |
| | XM_939562_at | XM_939562 | 0.513 | 712. |
| | XM_085463_at | XM_085463 | 0.513 | 713. |
| | XM_928138_at | XM_928138 | 0.513 | 714. |
| | NM_001018060_at | NM_001018060 | 0.496 | 715. |
| | NM_001013841_at | NM_001013841 | 0.492 | 716. |
| | NM_017720_at | NM_017720 | 0.492 | 717. |
| | NM_138342_at | NM_138342 | 0.475 | 718. |
| | NM_178859_at | NM_178859 | 0.474 | 719. |
| | NM_144704_at | NM_144704 | 0.467 | 720. |
| | XM_930288_at | XM_930238 | 0.464 | 721. |
| | XM_943650_at | XM_943650 | 0.463 | 722. |
| | XM_943644_at | XM_943644 | 0.463 | 723. |
| | XM_938362_at | XM_938362 | 0.463 | 724. |
| | XM_943655_at | XM_943655 | 0.463 | 725. |
| | XM_934563_at | XM_934563 | 0.463 | 726. |
| | XM_934567_at | XM_934567 | 0.463 | 727. |
| | XM_934562_at | XM_934562 | 0.462 | 728. |
| | XM_943653_at | XM_943653 | 0.46 | 729. |
| | XM_934566_at | XM_934566 | 0.459 | 730. |
| | XM_932654_at | XM_932654 | 0.45 | 731. |
| | XM_932662_at | XM_932662 | 0.45 | 732. |
| | XM_932668_at | XM_932668 | 0.449 | 733. |
| | XM_932703_at | XM_932703 | 0.449 | 734. |
| | XM_932711_at | XM_932711 | 0.449 | 735. |
| | XM_932658_at | XM_932658 | 0.449 | 736. |
| | XM_932681_at | XM_932681 | 0.449 | 737. |
| | XM_928205_at | XM_928205 | 0.449 | 738. |
| | XM_932685_at | XM_932685 | 0.448 | 739. |
| | XM_932696_at | XM_932696 | 0.448 | 740. |
| | XM_932688_at | XM_932688 | 0.448 | 741. |
| | XM_932700_at | XM_932700 | 0.448 | 742. |
| | XM_932691_at | XM_932691 | 0.448 | 743. |
| | XM_932317_at | XM_932317 | 0.446 | 744. |
| | XM_927808_at | XM_927808 | 0.446 | 745. |
| | XM_938923_at | XM_938923 | 0.441 | 746. |
| | XR_000535_at | XR_000535 | 0.44 | 747. |
| | XM_932303_at | XM_932303 | 0.437 | 748. |
| | XM_932195_at | XM_932195 | 0.437 | 749. |
| | XM_941939_at | XM_941939 | 0.437 | 750. |
| | XM_932301_at | XM_932301 | 0.437 | 751. |
| | XM_932286_at | XM_932286 | 0.437 | 752. |
| | XM_927596_at | XM_927596 | 0.437 | 753. |
| | XM_932296_at | XM_932296 | 0.437 | 754. |
| | XM_932282_at | XM_932282 | 0.437 | 755. |
| | XM_932268_at | XM_932268 | 0.437 | 756. |
| | XM_932294_at | XM_932294 | 0.437 | 757. |
| | XM_932329_at | XM_932329 | 0.437 | 758. |
| | XM_932291_at | XM_932291 | 0.436 | 759. |
| | XM_932265_at | XM_932265 | 0.436 | 760. |
| | XM_932324_at | XM_932324 | 0.436 | 761. |
| | XM_932280_at | XM_932280 | 0.436 | 762. |
| | XM_932311_at | XM_932311 | 0.436 | 763. |
| | XM_932335_at | XM_932335 | 0.435 | 764. |
| | NR_002815_at | NR_002815 | 0.435 | 765. |
| | XM_936408_at | XM_936408 | 0.431 | 766. |
| | XM_925981_at | XM_925981 | 0.431 | 767. |
| | XM_926814_at | XM_926814 | 0.43 | 768. |
| | XM_932563_at | XM_932563 | 0.415 | 769. |
| | XM_946181_at | XM_946181 | 0.415 | 770. |
| | XM_928053_at | XM_928053 | 0.415 | 771. |
| | XM_942645_at | XM_942645 | 0.415 | 772. |
| | NM_022097_at | NM_022097 | 0.411 | 773. |
| | NM_001013714_at | NM_001013714 | 0.397 | 774. |
| | NM_152672_at | NM_152672 | 0.17 | 775. |

### EXAMPLES

### Example I

[0141] A biological sample is obtained via standard biopsy techniques from the ascending colon of a patient diagnosed with Crohn's Disease. A control biopsy is obtained from a matched segment of the colon from a normal subject (not diagnosed with an IBD). The biopsy is obtained at the time of diagnosis. The biological sample is placed in RNAlater™ and stored on ice until processing. Total RNA is prepared utilizing the Qiagen RNeasy mini-column. RNA quality is then assessed using the Agilent 2100 Bioanalyzer. About 400 to about 500 nanograms of total RNA are used. The RNA is then labeled using the Target Amp 1—Round Aminoallyl—aRNA Amplification Kit available from Epicentre (726 Post Road Madison, Wis. 53713 U.S.A.) to prepare cRNA, following the manufacturer's instructions. The TargetAmpl—Round Aminoallyl-aRNA Amplification Kit (Epicentre) is used to make double-stranded cDNA from total RNA. An in vitro transcription reaction creates cRNA target. Biotin-X-X-NHS (Epicentre) is used to label the aminoallyl-aRNA with biotin following the manufacturer's instructions.

[0142] The biotin-labeled cRNA target is then chemically fragmented and hybridized to an Affymetrix Genechip Array, HGU133 Plus Version 2 Affymetrix GeneChip, available from Affymetrix (3420 Central Expressway, Santa Clara, Calif. 95051). A hybridization cocktail is prepared, containing 0.034 ug/uL fragmented cRNA, 50 pM Control Oligonucleotide B2 (Affymetrix), 2OX Eukaryotic Hybridization Controls (1.5 pM bioB, 5 pM bioC, 25 pM bioD, 100 pM cre) (Affymetrix), 0.1 mg/mL Herring Sperm DNA (Promega, 2800 Woods Hollow Road, Madison, Wis. 53711 USA), 0.5 mg/mL Acetylated BSA (Invitrogen), and IX Hybridization Buffer. The hybridization cocktail is heated to 99° C. for 5 minutes, to 45° C. for 5 minutes, and spun at maximum speed in a microcentrifuge for 5 minutes. The probe array is then filled with 200 uL of IX Hybridization Buffer and incubated at 45° C. for 10 minutes in the GeneChip Hybridization Oven 640 (Affymetrix) while rotating at 60 rpm. The IX Hybridization Buffer is removed and the probe array filled with 200 uL of the hybridization cocktail. The probe array is then incubated at 45° C. for 16 hrs in a Hybridization Oven rotating at 60 rpm.

[0143] The array is then washed and stained using the Fluidics Station 450 (Affymetrix) and the fluidics protocol EukGE-WS2v4_{—}450 (Affymetrix). The stain used is R-Phycoerythrin Streptavidin, available from Molecular Probes. The antibody used is anti-streptavidin antibody (goat) biotinylated, available from Vector Laboratories.

[0144] A labeled sample obtained from a single control is used in each batch of microarray experiments. The gene expression results for the new samples within that batch are normalized to the gene expression results for the common control within that batch to provide normalized results that can then be compared between batches.

[0145] The probe arrays are then scanned using the Affymetrix GeneChip Scanner 3000, using the Genechip Operating Software Iv4, available from Affymetrix.

[0146] Results are interpreted using GeneSpring 7.3 Software, available from Silicon Genetics. Raw data is filtered on an expression level of 10, and then normalized to a uniform internal control RNA from a single healthy control. Each array is then normalized in the same manner. Global scaling is used to adjust the average intensity or signal value of each probe array to the same Target Intensity value (TGT) of about 1500. The internal control genes, GAPDH and B-actin, are used to check the quality of the RNA. The assay quality is determined by comparing the signals of the 3′ probe set to the 5′ probe set of the internal control genes. Acceptable 3′ to 5′ ratios are between about 1 and about 3.

[0147] Prokaryotic Spike controls are used to determine whether the hybridization of target RNA to the array occurred properly. To control for chip to chip variation in expression intensities, a common RNA specimen is used, which is labeled and hybridized together with each new batch of biopsy samples.

### Example II

### Gene Expression Profile Determination Using Multiplex PCR

[0148] A biological sample is obtained via standard biopsy techniques from the intestines of a patient diagnosed with an inflammatory bowel disease. A control biopsy is obtained from a matched segment of the colon from a subject diagnosed with an IBD, but known to be a “responder” to first line therapy. The biological sample is placed in RNAlater™ and stored on ice until processing. Total RNA is prepared utilizing the Qiagen RNeasy mini-column. RNA quality is then assessed using the Agilent 2100 Bioanalyzer. About 400 to about 500 nanograms of total RNA are used.

[0149] PCR primers corresponding to the genes listed in Table 5 and the housekeeping gene GAPDH are synthesized using techniques known in the art. The PCR primers are radiolabeled and selected such that the primers have a primer length of about 18 to about 24 base pairs, and a GC content of about 35% to about 60%, thus having an annealing temperature of about 55° C. to about 58° C. Longer primers of about 28-30 base pairs may be used at higher annealing temperatures. Melting point and primer-primer interactions may be determined using commercially available software such as Primer Premier, available from Premier Biosoft International, 3786 Corina Way, Palo Alto, Calif. 94303-4504. The PCR reaction mixture includes Ix PCR buffer, 0.4 uM of each primer, 5% DMSO, and 1 unit Taq polymerase (Life Technologies, Gaithersburg, Md., USA) per 24 uL reaction volume. Nucleotides (dNTP) (Pharmacia Biotech, Piscataway, N.J., USA) are stored as a 100 mM stock solution (25 mM each dATP, dCTP, dGTP and dTTP). The standard 10×PCR buffer is made as described (Perkin-Elmer, Norwalk, Conn., USA) and contains 400 mM KCL, 100 mM Tris-HCl, pH 8.3 (at 24° C.) and 14 mM MgCl₂. DMSO, BSA and gycerol may be purchased from Sigma Chemical, St. Louis, Mo., USA. The reaction mixtures are then subjected to the following cycling conditions: a first denatureing step of 94° C. for 4 minutes, a denature step at 94° C. for 30 seconds, an annealing step at 54° C. for 30 s, then an extension step at 65 C for one minute. The samples are subjected to 32 cycles, with a final extension step at 65 C for 3 minutes.

[0150] Multiplex PCR products are then separated by size on a standard sequencing gel composed of 5% polyacrylamide, and containing 6M urea and 890 mM Tris-borate and 2 mM EDTA. A radiolabeled DNA ladder is used for size determination of each product. Sample is loaded on the gel and the multiplex reaction mixture is electrophoretically separated by size according to standard conditions, for example, 1.5 hours at 2000V, 50 mA current, 20 W power, gel temperature of 51 C. Gene expression of the genes listed in Table 5 is then determined by computer imaging (using GeneScan™ software) of the resultant bands corresponding to PCR products for each gene of interest, quantifying the intensity of each band, and comparing relative quantities of each band of the patient of interest to gene expression in a control subject (the “responder” patient). Both the experimental sample and the control subject results are normalized to GAPDH expression in each sample.

[0151] The expression pattern of the patient sample is then compared to the training set of 20 responders and 20 non-responders, using the k-nearest neighbors algorithm, to predict whether the patient is likely to be a “responder” or “non-responder” patient, as described above.

The application's sequence listing, which the Patent Office published only in electronic form, follows.

SEQUENCE LISTING (775 sequences)

SEQ ID NO: 1 - DNA, 1829 bp, Homo sapiens
gggattcgggcctgggactgtgtctgtcgcccatggccgccgcgctgctcgcccgggcctcgggccctgcccgcagagctctctgtcctagggcctggcggcagttacacaccatctaccagtctgtggaactgcccgagacacaccagatgttgctccagacatgccgggactttgccgagaaggagttgtttcccattgcagcccaggtggataaggaacatctcttcccagcggctcaggtgaagaagatgggcgggcttgggcttctggccatggacgtgcccgaggagcttggcggtgctggcctcgattacctggcctacgccatcgccatggaggagatcagccgtggctgcgcctccaccggagtcatcatgagtgtcaacaactctctctacctggggcccatcttgaagtttggctccaaggagcagaagcaggcgtgggtcacgcctttcaccagtggtgacaaaattggctgctttgccctcagcgaaccagggaacggcagtgatgcaggagctgcgtccaccaccgcccgggccgagggcgactcatgggttctgaatggaaccaaagcctggatcaccaatgcctgggaggcttcggctgccgtggtctttgccagcacggacagagccctgcaaaacaagggcatcagtgccttcctggtccccatgccaacgcctgggctcacgttggggaagaaagaagacaagctgggcatccggggctcatccacggccaacctcatctttgaggactgtcgcatccccaaggacagcatcctgggggagccagggatgggcttcaagatagccatgcaaaccctggacatgggccgcatcggcatcgcctcccaggccctgggcattgcccagaccgccctcgattgtgctgtgaactacgctgagaatcgcatggccttcggggcgcccctcaccaagctccaggtcatccagttcaagttggcagacatggccctggccctggagagtgcccggctgctgacctggcgcgctgccatgctgaaggataacaagaagcctttcatcaaggaggcagccatggccaagctggccgcctcggaggccgcgaccgccatcagccaccaggccatccagatcctgggcggcatgggctacgtgacagagatgccggcagagcggcactaccgcgacgcccgcatcactgagatctacgagggcaccagcgaaatccagcggctggtgatcgccgggcatctgctcaggagctaccggagctgagcccgcggcggactgccccaggactgcgggaaggcgcgggagccaggggcctccaccccaaccccggctcagagactgggcggcccggcgggggctccctggggaccccagatgggctcagtgctgccacccagatcagatcacatgggaatgaggccctccgaccattggcagctccgcctctgggcctttccgcctcctcaccactgtgcctcaagttcctcatctaagtggccctggctcctgggggcggggttgtgggggggctgagcgacactcagggacacctcagttgtcctcccgcgggccctggtgccctggcatgaaggcccagtgcgacaggcccttggtggggtctgtcttttccttgaggtcagaggtcaggagcagggctggggtcaggatgacgaggcctggggtcctggtgttgggcaggtggtggggctgggccatggagctggcccagaggcccctcagccctttgtaaagtctgatgaaggcaggggtggtgattcatgctgtgtgactgactgtgggtaataaacacacctgtccccc

SEQ ID NO: 2 - DNA, 1703 bp, Homo sapiens
ttgggcgccacaccttgcgcgccccggggcccaaggagacgaccctgaagaggagcctggctacttttgcctcagacgagtccggagcgccgggttaaccggtctgaagtcccaggggctttctgggactgctcagccaccggcagcttccggcaccaggggacgccggacgccgtccggacattcggcgcgcttgccacgatcttggacgggtctcgggcctcgacctttgaattccccgctccggctccaagatgtcagcaacgctgatcctggagcccccaggccgctgctgctggaacgagccggtgcgcattgccgtgcgcggcctggccccggagcagcgggttacgctgcgcgcgtccctgcgcgacgagaagggcgcgctcttccgggcccacgcgcgctactgcgccgacgcctgcggcgagctggacctggagcgcgcacccgcgctgggcggcagcttcgcgggactcgagcccatggggctgctctgggccctggaacccgagaagcctttttggcgcttcctgaagcgggacgtacagattccttttgtcgtggagttggaggtgctggacggccacgaccccgagcctggacggctgctgtgccaggcgcagcacgagcgccacttcctcccgccaggggtgcggcgccagtcggtgcgagcgggccgggtgcgcgccacgctcttcctgccgccaggacctggacccttcccagggatcattgacatctttggtattggagggggcctcttggaatatcgagccagcctccttgctggccatggctttgccacgttggctctagcttattataactttgaagatctccccaataacatggacaacatatccctggagtacttcgaagaagccgtatgctacatgcttcaacatccccaggtaaaaggcccaggcattgggcttttgggcatttctctaggagctgatatttgtctctcaatggcctcattcttgaagaatgtctcagccacagtttccatcaatggatctgggatcagtgggaacacagccatcaactataagcacagtagcattccaccattgggctatgacctgaggagaatcaaggtagctttctcaggcctcgtggacatcgtggatataaggaatgctctcgtaggagggtacaagaaccccagcatgattccaatagagaaggcccaggggcccatcctgctcattgttggtcaggatgaccataactggagaagtgagttgtatgcccaaacagtctctgaacggttacaggcccatggaaaggaaaaaccccagatcatctgttaccctgggactgggcattacatcgagcctccttacttccccctgtgcccagcttcccttcacagattactgaacaaacatgttatatggggtggggagcccagggctcattctaaggcccaggaagatgcctggaagcaaattctagccttcttctgcaaacacctgggaggtacccagaaaacagctgtccctaaattgtaatgcatttgtctgttgttgacatgagagattcaagatcagattctagtgttcagtaaccctatgtgaatcagatgtctcctggataacattaaagccatgtctttgtcattaaaaaaaaaaaaaaaaaaaaaaaaaaaaaaaaaaaaaaaaaaaaaaaaaaaaaaaaaaaaaaaaaaaaaaaaa

SEQ ID NO: 3 - DNA, 962 bp, Homo sapiens
atctgccggaagagtcaggttctgtgtatgtctccgcgtcttccgcggagcgggtgtgcagggcctgcagcattgaactagatgtcgtccccgcaggccccagaagatgggcagggctgtggcgaccgcggcgatccccctggggacctccgtagcgtcttggtcacgaccgtgctcaacctcgagccgctggacgaggatctcttcagaggaaggcattactgggtaccggccaagaggctgtttggtggtcagatcgtgggccaggccctggtggctgcagccaagtctgtgagtgaagacgtccacgtgcactccctgcactgctactttgttcgggcaggggacccgaagctgccagtactgtaccaagtggagcggacacgaacagggtcgagcttctcggtgcgctctgtgaaggccgtgcaacatgggaagcccatcttcatctgccaggcctccttccagcaggcccagcccagccccatgcagcaccagttctccatgcccactgtgccaccaccagaagagctgcttgactgtgagaccctcattgaccagtatttaagggaccctaacctccaaaagaggtacccattggcgctcaaccgaattgctgctcaggaggtccccattgagatcaagccagtaaacccatcccccctgagccagctgcagagaatggagcccaaacagatgttctgggtgcgagcccggggctatattggtggctctcgggggctggtccatgggcggctgtggcgtcaggatggagtcctagctgtgacctgtgcccaggagggcgtgatccgagtgaagccccaggtctcagagagcaagctgtagccagaggtaccagcttcgcctggggcttcaagaacctcccatctatccccattcctgagacaggagttacagtcccttttggccctcacatccaataaagagactgataccactgg

SEQ ID NO: 4 - DNA, 1157 bp, Homo sapiens
atctgccggaagagtcaggttctgtgtatgtctccgcgtcttccgcggagcgggtgtgcagggcctgcagcattgaactagatgtcgtccccgcaggccccagaagatgggcagggctgtggcgaccgcggcgatccccctggggacctccgtagcgtcttggtcacgaccgtgctcaacctcgagccgctggacgaggatctcttcagaggaaggcattactgggtaccggccaagaggctgtttggtggtcagatcgtgggccaggccctggtggctgcagccaagtctgtgagtgaagacgtccacgtgcactccctgcactgctactttgttcgggcaggggacccgaagctgccagtactgtaccaagtggagcggacacgaacagggtcgagcttctcggtgcgctctgtgaaggccgtgcaacatgggaagcccatcttcatctgccaggcctccttccagcaggcccagcccagccccatgcagcaccagttctccatgcccactgtgccaccaccagaagagctgcttgactgtgagaccctcattgaccagtatttaagggaccctaacctccaaaagaggtacccattggcgctcaaccgaattgctgctcaggaggtccccattgagatcaagccagtaaacccatcccccctgagccagctgcagagaatggagcccaaacagatgttctgggtgcgagcccggggctatattggcgagggcgacatgaagatgcactgctgcgtggccgcctatatctccgactatgccttcttgggcactgcactgctgcctcaccagtggcagcacaaggtgcacttcatggtctcactggaccattccatgtggttccacgcccccttccgagctgaccactggatgctctatgaatgcgagagcccctgggccggtggctctcgggggctggtccatgggcggctgtggcgtcaggatggagtcctagctgtgacctgtgcccaggagggcgtgatccgagtgaagccccaggtctcagagagcaagctgtagccagaggtaccagcttcgcctggggcttcaagaacctcccatctatccccattcctgagacaggagttacagtcccttttggccctcacatccaataaagagactgataccactgg

SEQ ID NO: 5 - DNA, 1023 bp, Homo sapiens
atctgccggaagagtcaggttctgtgtatgtctccgcgtcttccgcggagcgggtgtgcagggcctgcagcattgaactagatgtcgtccccgcaggccccagaagatgggcagggctgtggcgaccgcggcgatccccctggggacctccgtagcgtcttggtcacgaccgtgctcaacctcgagccgctggacgaggatctcttcaggggacccgaagctgccagtactgtaccaagtggagcggacacgaacagggtcgagcttctcggtgcgctctgtgaaggccgtgcaacatgggaagcccatcttcatctgccaggcctccttccagcaggcccagcccagccccatgcagcaccagttctccatgcccactgtgccaccaccagaagagctgcttgactgtgagaccctcattgaccagtatttaagggaccctaacctccaaaagaggtacccattggcgctcaaccgaattgctgctcaggaggtccccattgagatcaagccagtaaacccatcccccctgagccagctgcagagaatggagcccaaacagatgttctgggtgcgagcccggggctatattggcgagggcgacatgaagatgcactgctgcgtggccgcctatatctccgactatgccttcttgggcactgcactgctgcctcaccagtggcagcacaaggtgcacttcatggtctcactggaccattccatgtggttccacgcccccttccgagctgaccactggatgctctatgaatgcgagagcccctgggccggtggctctcgggggctggtccatgggcggctgtggcgtcaggatggagtcctagctgtgacctgtgcccaggagggcgtgatccgagtgaagccccaggtctcagagagcaagctgtagccagaggtaccagcttcgcctggggcttcaagaacctcccatctatccccattcctgagacaggagttacagtcccttttggccctcacatccaataaagagactgataccactgg

SEQ ID NO: 6 - DNA, 3089 bp, Homo sapiens
agcagttcctcctaactcctgccagaaacagctctcctcaacatgagagctgcacccctcctcctggccagggcagcaagccttagccttggcttcttgtttctgctttttttctggctagaccgaagtgtactagccaaggagttgaagtttgtgactttggtgtttcggcatggagaccgaagtcccattgacacctttcccactgaccccataaaggaatcctcatggccacaaggatttggccaactcacccagctgggcatggagcagcattatgaacttggagagtatataagaaagagatatagaaaattcttgaatgagtcctataaacatgaacaggtttatattcgaagcacagacgttgaccggactttgatgagtgctatgacaaacctggcagccctgtttcccccagaaggtgtcagcatctggaatcctatcctactctggcagcccatcccggtgcacacagttcctctttctgaagatcagttgctatacctgcctttcaggaactgccctcgttttcaagaacttgagagtgagactttgaaatcagaggaattccagaagaggctgcacccttataaggattttatagctaccttgggaaaactttcaggattacatggccaggacctttttggaatttggagtaaagtctacgaccctttatattgtgagagtgttcacaatttcactttaccctcctgggccactgaggacaccatgactaagttgagagaattgtcagaattgtccctcctgtccctctatggaattcacaagcagaaagagaaatctaggctccaagggggtgtcctggtcaatgaaatcctcaatcacatgaagagagcaactcagataccaagctacaaaaaacttatcatgtattctgcgcatgacactactgtgagtggcctacagatggcgctagatgtttacaacggactccttcctccctatgcttcttgccacttgacggaattgtactttgagaagggggagtactttgtggagatgtactaccggaatgagacgcagcacgagccgtatcccctcatgctacctggctgcagccccagctgtcctctggagaggtttgctgagctggttggccctgtgatccctcaagactggtccacggagtgtatgaccacaaacagccatcaaggtactgaggacagtacagattagtgtgcacagagatctctgtagaaagagtagctgccctttctcagggcagatgatgctttgagaacatactttggccattaccccccagctttgaggaaaatgggctttggatgattattttatgttttagggacccccaacctcaggcaattcctacctcttcacctgaccctgcccccacttgccataaaacttagctaagttttgttttgtttttcagcgttaatgtaaaggggcagcagtgccaaaatataatcagagataaagcttaggtcaaagttcatagagttcccatgaactatatgactggccacacaggatcttttgtatttaaggattctgagattttgcttgagcaggattagataagtctgttctttaaatttctgaaatggaacagatttcaaaaaaaattcccacaatctagggtgggaacaaggaaggaaagatgtgaataggctgatggggaaaaaaccaatttacccatcagttccagccttctctcaaggagaggcaaagaaaggagatacagtggagacatctggaaagttttctccactggaaaactgctactatctgtttttatatttctgttaaaatatatgaggctacagaactaaaaattaaaacctctttgtgtcccttggtcctggaacatttatgttccttttaaagaaacaaaaatcaaactttacagaaagatttgatgtatgtaatacatatagcagctcttgaagtatatatatcatagcaaataagtcatctgatgagaacaagctatttgggcacaacacatcaggaaagagagcaccacgtgatggagtttctccagaagctccagtgataagagatgttgactctaaagttgatttaaggccaggcatggtggtttacgcctataatcccagcattttgggactccgaggtgggcagatcacttgagctcaggagctcaagatcagcctgggcaacatggtgaaaccttgtctctacataaaatacaaaaacttagatgggcatggtgctgtgtgcctatagtccactacttgtggggctaaggcaggaggatcacttgagccccggaggtcgaggctacagtgacccaagagtgcactactgtactccagccagggcaagagagcgagaccctgtctcaataaataaataaataaataaataaataaataaataaaaacaaagttgattaagaaaggaagtataggccaggcacagtggctcacacctgtaatccttgcattttggaaggctgaggcaggaggatcactttaggcctggtgtgttcaagaccagcctggtcaacatagtgagacactgtctctaccaaaaaaaggaaggaagggacacatatcaaactgaaacaaaattagaaatgtaattatgttatgttctaagtgcctccaagttcaaaacttattggaatgttgagagtgtggttacgaaatacgttaggaggacaaaaggaatgtgtaagtctttaatgccgatatcttcagaaaacctaagcaaacttacaggtcctgctgaaactgcccactctgcaagaagaaatcatgatatagctttccatgtggcagatctacatgtctagagaacactgtgctctattaccattatggataaagatgagatggtttctagagatggtttctactggctgccagaatctagagcaaagccatcccccctcctggttggtcacagaatgactgacaaagacatcgattgatatgcttctttgtgttatttccctcccaagtaaatgtttgtccttgggtccattttctatgcttgtaactgtcttctagcagtgagccaaatgtaaaatagtgaataaagtcattattaggaagttcaaaaaaaaaaaa

SEQ ID NO: 7 - DNA, 5043 bp, Homo sapiens
cgggattcggctggctctgccacaccaccgcgcgcccccgctccgcccgcccctccgggcgcgtcttttccgggctcgcgctgagtcccgcctccgccggctgtccgggtgcgcgcgcgccgctgcggctttttctctggcctccgccgcgcgctcctcctcgtcccagcgctagcgggcacgcggttcctttttgcgagctttccgagtgccaggcgccggccggctgcgaagacgcggtgggccgcccctccgattgaaatcacagaagatattcgtgttcttcttaagagaaaaagaggacatttaaaaacgctatggcaaagagaataaaagctaagcccacttcagacaaacctggaagtccatatcgctctgtcacacacttcgactcactagctgtaatagacatccctggagcagatactctggataaattatttgaccatgctgtatccaagtttgggaagaaggacagccttgggaccagggaaatcctaagtgaagaaaatgaaatgcagccaaatggaaaagtttttaagaagttaattcttgggaattataaatggatgaactatcttgaagtgaatcgcagagtgaataactttggtagtggactcactgcactgggactaaaaccaaagaacaccattgccatcttctgtgagaccagggccgaatggatgattgcagcacagacctgctttaagtacaactttcctcttgtgactttatatgccacacttggcaaagaagcagtagttcatgggctaaatgaatctgaggcttcctatctgattaccagtgttgaacttctggaaagtaaacttaagactgcattgttagatatcagttgtgttaaacatatcatttatgtggacaataaggctatcaataaagcagagtaccctgaaggatttgagattcacagcatgcaatcagtagaagagttgggatctaacccagaaaacttgggcattcctccaagtagaccaacgccttcagacatggccattgttatgtatactagtggttctactggccgacctaagggagtgatgatgcatcatagcaatttgatagctggaatgacaggccagtgtgaaagaatacctggactgggaccgaaggacacatatattggctacttgcctttggctcatgtgctagaactgacagcagagatatcttgctttacctatggctgcaggattggatattcttctccgcttacactctctgaccagtccagcaaaattaaaaaaggaagcaaaggagactgtactgtactgaagcccacacttatggctgctgttccggaaatcatggatagaatttataagaatgttatgagcaaagtccaagagatgaattatattcagaaaactctgttcaagatagggtatgattacaaattggaacagatcaaaaagggatatgatgcacctctttgcaatctgttactgtttaaaaaggtcaaggccctgctgggagggaatgtccgcatgatgctgtctggaggggccccgctatctcctcagacacaccgattcatgaatgtctgcttctgctgcccaattggccagggttatggactgacagaatcatgtggtgctgggacagttactgaagtaactgactatactactggcagagttggagcacctcttatttgctgtgaaattaagctaaaagactggcaagaaggcggttatacaattaatgacaagccaaaccccagaggtgaaatcgtaattggtggacagaacatctccatgggatattttaaaaatgaagagaaaacagcagaagattattctgtggatgaaaatggacaaaggtggttttgcactggtgatattggagaattccatcccgatggatgtttacagattatagatcgtaagaaagatctagtgaagttacaagcaggagagtatgtatctcttgggaaagtagaagctgcactgaagaattgtccacttattgacaacatctgtgcttttgccaaaagtgatcagtcctatgtgatcagttttgtggttcctaaccagaaaaggttgacacttttggcacaacagaaaggggtagaaggaacttgggttgatatctgcaataatcctgctatggaagctgaaatactgaaagaaattcgagaagctgcaaatgccatgaaattggagcgatttgaaattccaatcaaggttcgattaagcccagagccatggacccctgaaactggtttggtaactgatgctttcaaactgaaaaggaaggagctgaggaaccattacctcaaagacattgaacgaatgtatgggggcaaataaaatgttgttgtcttattgacagttgtgcaggaggtagcctggtggttttcaacctctagaattttaagcctttgttgaactgttagaatgtaaggtatatcattctaaagatagagtaaaaagaaaacaaaaccaaaagttattaaaattgttgtccggtttactttaacttagttttgcatagttctagtgcagctgaaattgaaaagttatttccctttagctgtgttattatagagcagaaattctgtttttaaaaattagcctaagatatacttgtttttgtaaagaaaaatatttaatgttgaacaaaataaattggagttggagtagaatgtagtttgaggaaatttgcagcttccaatgcctcttgtcttcctatttcagaagtttaaatattaagcatgacagaaaatatgtattaacactactcaaagcaaaagtgctgcagggctttaaaattctcttccaaccatttatcttgaaggaaaaattcaatagtaatataatacacaaaatcaaataataccttagaaggtattaagattataattgttgcataggttagatatagagtcattgtaatgttgtgaataattacagtgcctaaaataagaatagaacaacatatacaacaccaaaaaatatctagtaatatatttaaagggaaattgagctgctttttttgaaactttgagatctaaaaataactgtaattatttgaatgactaagaggaaagtacattttttgaaatgctgaaaattgcctttctgtgtttattcaaactgaaaagctgagaccaagagcaaggaaggtaaaaagttaacaggcaaacattttctcttagaaaaggtgataaaatcataagtatttggaattagaacccttgcacagcactgaacctgggaaagagatttaaactctgaatttatctttgataacagggattgattttaaaatgtacatgtattaaattacatttgtaatttaaggtctgtttgctgttgctgattttattcttgatcagtagtttgcatttcagaaagcctttcattttgctttaagtttagcaaagcggggttataatgaatgacttccccaatatcttgcttgaacttacagtgattaacttggatgagttttgggaagttaaagggaagaaaacactgttatcattttttcctgtttgggaagagcttagaaactggaaatactagatttgggagaagggcagagttacttgataagggacttgatgtttgtgcagtaacttgggagtgtggtttctttttgaatctttaattaaaacctgggattatatatccctgataaatattcacacttgaaccatagttactgtaaaatgcaaaaaatcttaatactgttattctttgcactttttcttaatcattttttatatatatgcatatatatatgtgtgtgtgtgtgttgcttatgttgttttgtacagatgtgggccaccattgcaacaaaatacattctttttgctctaaaatatttatgaagaaaatacttaaatgttatgtatatggtggtaataagggaaaaatcaagtattataaacaagaatgaaggtttttgtaaagatttctgttcagcgttttgcaaggtaaaattttaggcaagttttccctgaagttatgtgtatgtgagtattctcattcttcccaacttgcctttgaagagtgaaataccattattatcaagtagactactgttcagcttttattccttccctggttgtttatcccttaggaatgagtttcttagactttcccaatatgtgattttttttcccatttagaatggtgattttaaatgtgtgagtgcatgtactatcttatctcagatatttgcacccccaatctgcccccaactcccaaaagctagaacactgccaactgatctgttataggtcctttagaaacacataattaacacttaaggttgggtgctgctaattctttgcaaaaatccaaatattgttaagggaccagggagatgccactaccccttgattttccatctaaaaatatacatgtttatgtaaacaaatctttccatatccatagtgacttttcaagtatttaagcctaaagattttgatctcacatttttatacctgtttaaattgctcacagttattacatacacatcagccatcaactaaagttgtactttaaaaatttactacaatatgtacatttctaagtcaaacacttgtgacttttgctttaattccatgaatgttcctgcctccttgatatttgtatttattctttttttctctagagtagaggtataattgtgtgatatttcagaaatacagataaatgattcaaaaagtcacagttaaggagaatcatgtttctttgatcatgaataactgattagtaagtcttgcctatattttcctgatagcatatgacaaatgtttctaaggtaacaagatgagaacagataaagattgtgtggtgttttggatttggagagaaatattttaatttttaaatgcagttacaaattataatgtattcatatttgtactttctgttaaaatgcatgattgcagaattgtttagattttgtgtttattcttgatgaaaagctttgtttgttcttgtttttaagtttgcactcaaatcttaagaaataaatccacccatgttatcaaaaaaaaaaaaaaaaaaa

SEQ ID NO: 8 - DNA, 5356 bp, Homo sapiens
cgggattcggctggctctgccacaccaccgcgcgcccccgctccgcccgcccctccgggcgcgtcttttccgggctcgcgctgagtcccgcctccgccggctgtccgggtgcgcgcgcgccgctgcggctttttctctggcctccgccgcgcgctcctcctcgtcccagcgctagcgggcacgcggttcctttttgcgagctttccgagtgccaggcgccggccggctgcgaagacgcggtgggccgcccctccgattgaaatcacagaagatattcgtgttcttcttaagagaaaaagaggacattttagctttctcagttgaaggcgtactttattgtcggcttccaaagattactaacttttatctgtatcactaagattgaactgccttggctgtactgctattcttactgctgcttctattattgccttcttcagcacaataaggctttcaaaagccaaagaataacaagaaataagcaccattttagaagcctttccactatgaaacttaagctaaatgtgctcaccattattttgctgcctgtccacttgttaataacaatatacagtgcccttatatttattccatggtattttcttaccaatgccaagaagaaaaacgctatggcaaagagaataaaagctaagcccacttcagacaaacctggaagtccatatcgctctgtcacacacttcgactcactagctgtaatagacatccctggagcagatactctggataaattatttgaccatgctgtatccaagtttgggaagaaggacagccttgggaccagggaaatcctaagtgaagaaaatgaaatgcagccaaatggaaaagtttttaagaagttaattcttgggaattataaatggatgaactatcttgaagtgaatcgcagagtgaataactttggtagtggactcactgcactgggactaaaaccaaagaacaccattgccatcttctgtgagaccagggccgaatggatgattgcagcacagacctgctttaagtacaactttcctcttgtgactttatatgccacacttggcaaagaagcagtagttcatgggctaaatgaatctgaggcttcctatctgattaccagtgttgaacttctggaaagtaaacttaagactgcattgttagatatcagttgtgttaaacatatcatttatgtggacaataaggctatcaataaagcagagtaccctgaaggatttgagattcacagcatgcaatcagtagaagagttgggatctaacccagaaaacttgggcattcctccaagtagaccaacgccttcagacatggccattgttatgtatactagtggttctactggccgacctaagggagtgatgatgcatcatagcaatttgatagctggaatgacaggccagtgtgaaagaatacctggactgggaccgaaggacacatatattggctacttgcctttggctcatgtgctagaactgacagcagagatatcttgctttacctatggctgcaggattggatattcttctccgcttacactctctgaccagtccagcaaaattaaaaaaggaagcaaaggagactgtactgtactgaagcccacacttatggctgctgttccggaaatcatggatagaatttataagaatgttatgagcaaagtccaagagatgaattatattcagaaaactctgttcaagatagggtatgattacaaattggaacagatcaaaaagggatatgatgcacctctttgcaatctgttactgtttaaaaaggtcaaggccctgctgggagggaatgtccgcatgatgctgtctggaggggccccgctatctcctcagacacaccgattcatgaatgtctgcttctgctgcccaattggccagggttatggactgacagaatcatgtggtgctgggacagttactgaagtaactgactatactactggcagagttggagcacctcttatttgctgtgaaattaagctaaaagactggcaagaaggcggttatacaattaatgacaagccaaaccccagaggtgaaatcgtaattggtggacagaacatctccatgggatattttaaaaatgaagagaaaacagcagaagattattctgtggatgaaaatggacaaaggtggttttgcactggtgatattggagaattccatcccgatggatgtttacagattatagatcgtaagaaagatctagtgaagttacaagcaggagagtatgtatctcttgggaaagtagaagctgcactgaagaattgtccacttattgacaacatctgtgcttttgccaaaagtgatcagtcctatgtgatcagttttgtggttcctaaccagaaaaggttgacacttttggcacaacagaaaggggtagaaggaacttgggttgatatctgcaataatcctgctatggaagctgaaatactgaaagaaattcgagaagctgcaaatgccatgaaattggagcgatttgaaattccaatcaaggttcgattaagcccagagccatggacccctgaaactggtttggtaactgatgctttcaaactgaaaaggaaggagctgaggaaccattacctcaaagacattgaacgaatgtatgggggcaaataaaatgttgttgtcttattgacagttgtgcaggaggtagcctggtggttttcaacctctagaattttaagcctttgttgaactgttagaatgtaaggtatatcattctaaagatagagtaaaaagaaaacaaaaccaaaagttattaaaattgttgtccggtttactttaacttagttttgcatagttctagtgcagctgaaattgaaaagttatttccctttagctgtgttattatagagcagaaattctgtttttaaaaattagcctaagatatacttgtttttgtaaagaaaaatatttaatgttgaacaaaataaattggagttggagtagaatgtagtttgaggaaatttgcagcttccaatgcctcttgtcttcctatttcagaagtttaaatattaagcatgacagaaaatatgtattaacactactcaaagcaaaagtgctgcagggctttaaaattctcttccaaccatttatcttgaaggaaaaattcaatagtaatataatacacaaaatcaaataataccttagaaggtattaagattataattgttgcataggttagatatagagtcattgtaatgttgtgaataattacagtgcctaaaataagaatagaacaacatatacaacaccaaaaaatatctagtaatatatttaaagggaaattgagctgctttttttgaaactttgagatctaaaaataactgtaattatttgaatgactaagaggaaagtacattttttgaaatgctgaaaattgcctttctgtgtttattcaaactgaaaagctgagaccaagagcaaggaaggtaaaaagttaacaggcaaacattttctcttagaaaaggtgataaaatcataagtatttggaattagaacccttgcacagcactgaacctgggaaagagatttaaactctgaatttatctttgataacagggattgattttaaaatgtacatgtattaaattacatttgtaatttaaggtctgtttgctgttgctgattttattcttgatcagtagtttgcatttcagaaagcctttcattttgctttaagtttagcaaagcggggttataatgaatgacttccccaatatcttgcttgaacttacagtgattaacttggatgagttttgggaagttaaagggaagaaaacactgttatcattttttcctgtttgggaagagcttagaaactggaaatactagatttgggagaagggcagagttacttgataagggacttgatgtttgtgcagtaacttgggagtgtggtttctttttgaatctttaattaaaacctgggattatatatccctgataaatattcacacttgaaccatagttactgtaaaatgcaaaaaatcttaatactgttattctttgcactttttcttaatcattttttatatatatgcatatatatatgtgtgtgtgtgtgttgcttatgttgttttgtacagatgtgggccaccattgcaacaaaatacattctttttgctctaaaatatttatgaagaaaatacttaaatgttatgtatatggtggtaataagggaaaaatcaagtattataaacaagaatgaaggtttttgtaaagatttctgttcagcgttttgcaaggtaaaattttaggcaagttttccctgaagttatgtgtatgtgagtattctcattcttcccaacttgcctttgaagagtgaaataccattattatcaagtagactactgttcagcttttattccttccctggttgtttatcccttaggaatgagtttcttagactttcccaatatgtgattttttttcccatttagaatggtgattttaaatgtgtgagtgcatgtactatcttatctcagatatttgcacccccaatctgcccccaactcccaaaagctagaacactgccaactgatctgttataggtcctttagaaacacataattaacacttaaggttgggtgctgctaattctttgcaaaaatccaaatattgttaagggaccagggagatgccactaccccttgattttccatctaaaaatatacatgtttatgtaaacaaatctttccatatccatagtgacttttcaagtatttaagcctaaagattttgatctcacatttttatacctgtttaaattgctcacagttattacatacacatcagccatcaactaaagttgtactttaaaaatttactacaatatgtacatttctaagtcaaacacttgtgacttttgctttaattccatgaatgttcctgcctccttgatatttgtatttattctttttttctctagagtagaggtataattgtgtgatatttcagaaatacagataaatgattcaaaaagtcacagttaaggagaatcatgtttctttgatcatgaataactgattagtaagtcttgcctatattttcctgatagcatatgacaaatgtttctaaggtaacaagatgagaacagataaagattgtgtggtgttttggatttggagagaaatattttaatttttaaatgcagttacaaattataatgtattcatatttgtactttctgttaaaatgcatgattgcagaattgtttagattttgtgtttattcttgatgaaaagctttgtttgttcttgtttttaagtttgcactcaaatcttaagaaataaatccacccatgttatcaaaaaaaaaaaaaaaaaaaa

SEQ ID NO: 9 - DNA, 2952 bp, Homo sapiens
gaagcgaatagcgttttcagagatattgggcggctcaagggtcttactctgtcgcccagtctgtaatgcagtgctgtgaccatagcccactgcagcctccacctcccaggctcaagcagtccttcccccctcgccctcatgaatagctgggactacagcctggagcattggtaagcgtcacactgccaaagtgagagctgctggagaactcataatcccaggaacgcctcttctactctccgagtaccccagtgaccagagtgagagaagctctgaacgagggcacgcggcttgaaggactgtgggcagatgtgaccaagagcctgcattaagttgtacaatggtagatggagtgatgattcttcctgtgcttatcatgattgctctcccctcccctagtatggaagatgagaagcccaaggtcaaccccaaactctacatgtgtgtgtgtgaaggtctctcctgcggtaatgaggaccactgtgaaggccagcagtgcttttcctcactgagcatcaacgatggcttccacgtctaccagaaaggctgcttccaggtttatgagcagggaaagatgacctgtaagaccccgccgtcccctggccaagctgtggagtgctgccaaggggactggtgtaacaggaacatcacggcccagctgcccactaaaggaaaatccttccctggaacacagaatttccacttggaggttggcctcattattctctctgtagtgttcgcagtatgtcttttagcctgcctgctgggagttgctctccgaaaatttaaaaggcgcaaccaagaacgcctcaatccccgagacgtggagtatggcactatcgaagggctcatcaccaccaatgttggagacagcactttagcagatttattggatcattcgtgtacatcaggaagtggctctggtcttccttttctggtacaaagaacagtggctcgccagattacactgttggagtgtgtcgggaaaggcaggtatggtgaggtgtggaggggcagctggcaaggggaaaatgttgccgtgaagatcttctcctcccgtgatgagaagtcatggttcagggaaacggaattgtacaacactgtgatgctgaggcatgaaaatatcttaggtttcattgcttcagacatgacatcaagacactccagtacccagctgtggttaattacacattatcatgaaatgggatcgttgtacgactatcttcagcttactactctggatacagttagctgccttcgaatagtgctgtccatagctagtggtcttgcacatttgcacatagagatatttgggacccaagggaaaccagccattgcccatcgagatttaaagagcaaaaatattctggttaagaagaatggacagtgttgcatagcagatttgggcctggcagtcatgcattcccagagcaccaatcagcttgatgtggggaacaatccccgtgtgggcaccaagcgctacatggcccccgaagttctagatgaaaccatccaggtggattgtttcgattcttataaaagggtcgatatttgggcctttggacttgttttgtgggaagtggccaggcggatggtgagcaatggtatagtggaggattacaagccaccgttctacgatgtggttcccaatgacccaagttttgaagatatgaggaaggtagtctgtgtggatcaacaaaggccaaacatacccaacagatggttctcagacccgacattaacctctctggccaagctaatgaaagaatgctggtatcaaaatccatccgcaagactcacagcactgcgtatcaaaaagactttgaccaaaattgataattccctcgacaaattgaaaactgactgttgacattttcatagtgtcaagaaggaagatttgacgttgttgtcattgtccagctgggacctaatgctggcctgactggttgtcagaatggaatccatctgtctccctccccaaatggctgctttgacaaggcagacgtcgtacccagccatgtgttggggagacatcaaaaccaccctaacctcgctcgatgactgtgaactgggcatttcacgaactgttcacactgcagagactaatgttggacagacactgttgcaaaggtagggactggaggaacacagagaaatcctaaaagagatctgggcattaagtcagtggctttgcatagctttcacaagtctcctagacactccccacgggaaactcaaggaggtggtgaatttttaatcagcaatattgcctgtgcttctcttctttattgcactaggaattctttgcattccttacttgcactgttactcttaattttaaagacccaacttgccaaaatgttggctgcgtactccactggtctgtctttggataataggaattcaatttggcaaaacaaaatgtaatgtcagactttgctgcattttacacatgtgctgatgtttacaatgatgccgaacattaggaattgtttatacacaactttgcaaattatttattacttgtgcacttagtagtttttacaaaactgctttgtgcatatgttaaagcttatttttatgtggtcttatgattttattacagaaatgtttttaacactatactctaaaatggacattttcttttattatcagttaaaatcacattttaagtgcttcacatttgtatgtgtgtagactgtaactttttttcagttcatatgcagaacgtatttagccattacccacgtgacaccaccgaatatattatcgatttagaagcaaagatttcagtagaattttagtcctgaacgctacggggaaaatgcattttcttcagaattatccattacgtgcatttaaactctgccagaaaaaaataactattttgttttaatctactttttgtatttagtagttatttgtataaattaaataaactgttttcaagtc

SEQ ID NO: 10 - DNA, 6466 bp, Homo sapiens
gccgggcagtgggcaggtatggctgagggcgtgtgagcgccgagcgctaagggccgccgccaccatgccagggggcgcaggcgccgcccggctctgcttgctggcgtttgccctgcagcccctccggccgcgggcggcgcgggagcctggatggacaagaggaagtgaggaaggcagccccaagctgcagcatgaacttatcatacctcagtggaagacttcagaaagccccgtgagagaaaagcatccactcaaagctgagctcagggtaatggctgaggggcgagaactgatcctggacctggagaagaatgagcaactttttgctccttcctacacagaaacccattatacttcaagtggtaaccctcaaaccaccacacggaaattggaggatcactgcttttaccacggcacggtgagggagacagaactgtccagcgtcacgctcagcacttgccgaggaattagaggactgattacggtgagcagcaacctcagctacgtcatcgagcccctccctgacagcaagggccaacaccttatttacagatctgaacatctcaagccgcccccgggaaactgtgggttcgagcactccaagcccaccaccagggactgggctcttcagtttacacaacagaccaagaagcgacctcgcaggatgaaaagggaagatttaaactccatgaagtatgtggagctttacctcgtggctgattatttagagtttcagaagaatcgacgagaccaggacgccaccaaacacaagctcatagagatcgccaactatgttgataagttttaccgatccttgaacatccggattgctctcgtgggcttggaagtgtggacccacgggaacatgtgtgaagtttcagagaatccatattctaccctctggtcctttctcagttggaggcgcaagctgcttgcccagaagtaccatgacaacgcccaattaatcacgggcatgtccttccacggcaccaccatcggcctggcccccctcatggccatgtgctctgtgtaccagtctggaggagtcaacatggaccactccgagaatgccattggcgtggctgccaccatggcccacgagatgggccacaactttggcatgacccatgattctgcagattgctgctcggccagtgcggctgatggtgggtgcatcatggcagctgccactgggcacccctttcccaaagtgttcaatggatgcaacaggagggagctggacaggtatctgcagtcaggtggtggaatgtgtctctccaacatgccagacaccaggatgttgtatggaggccggaggtgtgggaacgggtatctggaagatggggaagagtgtgactgtggagaagaagaggaatgtaacaacccctgctgcaatgcctctaattgtaccctgaggccgggggcggagtgtgctcacggctcctgctgccaccagtgtaagctgttggctcctgggaccctgtgccgcgagcaggccaggcagtgtgacctcccggagttctgtacgggcaagtctccccactgccctaccaacttctaccagatggatggtaccccctgtgagggcggccaggcctactgctacaacggcatgtgcctcacctaccaggagcagtgccagcagctgtggggacccggagcccgacctgcccctgacctctgcttcgagaaggtgaatgtggcaggagacacctttggaaactgtggaaaggacatgaatggtgaacacaggaagtgcaacatgagagatgcgaagtgtgggaagatccagtgtcagagctctgaggcccggcccctggagtccaacgcggtgcccattgacaccactatcatcatgaatgggaggcagatccagtgccggggcacccacgtctaccgaggtcctgaggaggagggtgacatgctggacccagggctggtgatgactggaaccaagtgtggctacaaccatatttgctttgaggggcagtgcaggaacacctccttctttgaaactgaaggctgtgggaagaagtgcaatggccatggggtctgtaacaacaaccagaactgccactgcctgccgggctgggccccgcccttctgcaacacaccgggccacgggggcagtatcgacagtgggcctatgccccctgagagtgtgggtcctgtggtagctggagtgttggtggccatcttggtgctggcggtcctcatgctgatgtactactgctgcagacagaacaacaaactaggccaactcaagccctcagctctcccttccaagctgaggcaacagttcagttgtcccttcagggtttctcagaacagcgggactggtcatgccaacccaactttcaagctgcagacgccccagggcaagcgaaaggtgatcaacactccggaaatcctgcggaagccctcccagcctcctccccggccccctccagattatctgcgtggtgggtccccacctgcaccactgccagctcacctgagcagggctgctaggaactccccagggcccgggtctcaaatagagaggacggagtcgtccaggaggcctcctccaagccggccaattccccccgcaccaaattgcatcgtttcccaggacttctccaggcctcggccgccccagaaggcactcccggcaaacccagtgccaggccgcaggagcctccccaggccaggaggtgcatccccactgcggccccctggtgctggccctcagcagtcccggcctctggcagcacttgccccaaagtttccagaatacagatcacagagggctggagggatgattagctcgaaaatctagacctgtccaaggggcttctccctttccttgagctctctggacactgcagaggacccatggccatggaaccctgaagaagcatgtctggccgcctctgagctcctcccaccctcctccaggaacctccacatctccaaaaatctccctgttgactcagtgcctcctcggcttccttggaagcccagagggactatgatctgatggcctctaggtgttgttttgtgcaatatacagccccaggtagggaggggagagtatgaggagggtgactggcagcttctcctccagactcctagccccgaggtgctgatggagatgctcaaggccagcaagcccctcaggccagcacttcgcttgcagaagccatccattcactcctggggtgcagggcacgcaagagagcttcccattgcttctgctctcctcagaggtcccgggctggatggaggctggtacttacccaccccttttagcttttagggattaaggaagggtcaagccagccactgctgtggccctgcccagggcttggttgagggaacggcttctggctgtatggctgcatgtgacaagccacgtcccctcccacctctccccaaacccctgcatccctgtattcacacgggtcactctgactcagacaggtactattcgtaggcagtgtagacagcaggaggagcaccgggcttgggcttcctctgagccgtgatgccaaaggttgcgactcctgactctggataatttttagttgctctttgttttctctgccgcactttcctggtgccccacgcttttctctcttccttcccctctcattctccctctaatgtgtggtgctttggtgagcaaaccctcagcagtcctgaccttcgggtgaccaggtgcttgtgacctacaagtcagagtcctctctcacagtcggccactggatttccctcactggctctcaggagtgtgaccagagtagacttggggcatggccattggggtcatatgtttatttttcattgtgttttgtgacctcagcagggtgggggtcttcctccttactctaagctaaatctaggtgaggtttccccttagggagcccagctatttacaaagtacacacgagggagcaggctggtcattgacttcgggctggaccgttgccctctgagcagagaacagacccatttctgggagctgcccgagatcactggagaaggcagccagcagcagctgcactggaacagtcagagcagggagcctcttcctcaacccagctttttgtcattcacttccttttgttctctctctggtcactgcccttacctgaccctcacagaaagagagctctgagcaggtgagggggtctgcggtggctcctgtcttccctgcagcagggaaggagggccgtgtggtgctttgctagataggacggtttttgcaaagcacctggagatgtttgctgggagatagactcccactccacaaaggtgctgggtggctctccggacaggagctggcctgactctcactcctctgaggctttcctggggcctcctcccatcctgccatgagcaattgtttgctcttgaaaacctcactgcaaggctgaggctgagcttctgattcaccaccccagggcctccttatagttctctgcacacaataggtgcttcttggatgttcttgggtttggaaataagtggaaaatacgggatgtacccctgggggaaaagcctgggttgggtttagaaagatctcaggaaaatgagtttctcttccctcagggtggctgtgatacaggttccccatgtccttgccgtgggtcatccttgctgtgggtcatccttgctgtggagatccattccccacctttcctgtggcccaaccttttatttaaatgtgctaccctctgcctcaaggcttggttcctggaaagtaaaggtgaaaacatcccctttcacccctctgcaaaacaaacaagcaacatcctcaaaacccaaccccatgcctcacagagcttcctgtggcttctccagcctttctccctcacatcaggaggtagatagctctgaaatgacagcgccacagccatagtgactgcatgagccatctgaacctgcagtccaccctccctggaaccacaccagaaagagacctgggttgtcgttttcttgctttttgttttgttttgttttattattttcatatcacctccatcccataaagttgtactgtgaactggaagatggtggaatgttttggaatttgatagactttcggcaaccagttctactaatgcttcactcctggctctgttcagggaggctgcccaggaggaagactggccattatgcatccccttttctttccagtgcccagtatgctgttttgaggtgtcaaatacaaataaatctgggcttagggaaggagagaccttattccaaagcacgattgcagaaggggaaagggaatattgcaaaagggagaggaaggggccttatgggaatagtgaaaaggctcagaccgaccgatggcaagatctgcaagcgtctcaaagcccaggcagaaaaggacttttcttttattggaagaagtaaacatggctagaaagaaccacgttcagggaatgacgttgtgcccagcctttttttttttttttttttttttgtctccaggggaggggctgtttgctggctcaggctgaggatggcccaaagtccagggtctggtggggaggagggaagcttaactcaagtttgggttagtgagttagcaagctctttgtgcagatggggatgtaggtaaatctttttaaaagtgaaattaacctcctgccaattttacaacccaagaatttttttttaagggccttggagccatctctaaaacaaacctcaagggatttagtgccctgtctccctgtctctagaagccttagcctgggcacctggctcaatcttgtaactgcctgctagccatagattcctttcagccttgctgacttctccctataaaagtaaagcctttttctgccccagctctgagacacttgcagatcttaaggtctgagacttgctgattttctggttggagtgtttttttgtattgccatagtcccttccccctgaagcaatagcccctccccacctcctgcaatacgcctttccaatctttattggaagtctctccctgcctacttcctaatttattcttatttgacagagggtatggaagacttgcaatttgaaaactggggaccagttccaaagtcagtaattgtgttaaccacgtgtataacagctctgctggacacccaagaaagccatgggaacgccaactggaaaggtccccttccccaggggagcctgcgaaggagaggttctgtagaatccaagcccacatttccaaagtcacccccaacgcgtcctctcacaccgtccactgtgcgtttgtatgtgtctgggatccagggcaatgtgaattttctttttatttgggagattgttcacggaaaacagatcttcttctctcttgtccacctattaattgtttacaatatttgtacatctatgcaaaatacttgaatgggccatggtgccttttttccttgttagtatttaattaaaaatgaattgtttgtcatttgcaatgtta

SEQ ID NO: 11 - DNA, 4111 bp, Homo sapiens
cggcagggttggaaaatgatggaagaggcggaggtggaggcgaccgagtgctgagaggaacctgcggaatcggccgagatggggtctggcgcgcgctttccctcggggacccttcgtgtccggtggttgctgttgcttggcctggtgggcccagtcctcggtgcggcgcggccaggctttcaacagacctcacatctttcttcttatgaaattataactccttggagattaactagagaaagaagagaagcccctaggccctattcaaaacaagtatcttatgttattcaggctgaaggaaaagagcatattattcacttggaaaggaacaaagaccttttgcctgaagattttgtggtttatacttacaacaaggaagggactttaatcactgaccatcccaatatacagaatcattgtcattatcggggctatgtggagggagttcataattcatccattgctcttagcgactgttttggactcagaggattgctgcatttagagaatgcgagttatgggattgaacccctgcagaacagctctcattttgagcacatcatttatcgaatggatgatgtctacaaagagcctctgaaatgtggagtttccaacaaggatatagagaaagaaactgcaaaggatgaagaggaagagcctcccagcatgactcagctacttcgaagaagaagagctgtcttgccacagacccggtatgtggagctgttcattgtcgtagacaaggaaaggtatgacatgatgggaagaaatcagactgctgtgagagaagagatgattctcctggcaaactacttggatagtatgtatattatgttaaatattcgaattgtgctagttggactggagatttggaccaatggaaacctgatcaacatagttgggggtgctggtgatgtgctggggaacttcgtgcagtggcgggaaaagtttcttatcacacgtcggagacatgacagtgcacagctagttctaaagaaaggttttggtggaactgcaggaatggcatttgtgggaacagtgtgttcaaggagccacgcaggcgggattaatgtgtttggacaaatcactgtggagacatttgcttccattgttgctcatgaattgggtcataatcttggaatgaatcacgatgatgggagagattgttcctgtggagcaaagagctgcatcatgaattcaggagcatcgggttccagaaactttagcagttgcagtgcagaggactttgagaagttaactttaaataaaggaggaaactgccttcttaatattccaaagcctgatgaagcctatagtgctccctcctgtggtaataagttggtggacgctggggaagagtgtgactgtggtactccaaaggaatgtgaattggacccttgctgcgaaggaagtacctgtaagcttaaatcatttgctgagtgtgcatatggtgactgttgtaaagactgtcggttccttccaggaggtactttatgccgaggaaaaaccagtgagtgtgatgttccagagtactgcaatggttcttctcagttctgtcagccagatgtttttattcagaatggatatccttgccagaataacaaagcctattgctacaacggcatgtgccagtattatgatgctcaatgtcaagtcatctttggctcaaaagccaaggctgcccccaaagattgtttcattgaagtgaattctaaaggtgacagatttggcaattgtggtttctctggcaatgaatacaagaagtgtgccactgggaatgctttgtgtggaaagcttcagtgtgagaatgtacaagagatacctgtatttggaattgtgcctgctattattcaaacgcctagtcgaggcaccaaatgttggggtgtggatttccagctaggatcagatgttccagatcctgggatggttaacgaaggcacaaaatgtggtgctggaaagatctgtagaaacttccagtgtgtagatgcttctgttctgaattatgactgtgatgttcagaaaaagtgtcatggacatggggtatgtaatagcaataagaattgtcactgtgaaaatggctgggctcccccaaattgtgagactaaaggatacggaggaagtgtggacagtggacctacatacaatgaaatgaatactgcattgagggacggacttctggtcttcttcttcctaattgttccccttattgtctgtgctatttttatcttcatcaagagggatcaactgtggagaagctacttcagaaagaagagatcacaaacatatgagtcagatggcaaaaatcaagcaaacccttctagacagccggggagtgttcctcgacatgtttctccagtgacacctcccagagaagttcctatatatgcaaacagatttgcagtaccaacctatgcagccaagcaacctcagcagttcccatcaaggccacctccaccacaaccgaaagtatcatctcagggaaacttaattcctgcccgtcctgctcctgcacctcctttatatagttccctcacttgatttttttaaccttctttttgcaaatgtcttcagggaactgagctaatactttttttttttcttgatgttttcttgaaaagcctttctgttgcaactatgaatgaaaacaaaacaccacaaaacagacttcactaacacagaaaaacagaaactgagtgtgagagttgtgaaatacaaggaaatgcagtaaagccagggaatttacaataacatttccgtttccatcattgaataagtcttattcagtcatcggtgaggttaatgcactaatcatggattttttgaacatgttattgcagtgattctcaaattaactgtattggtgtaagatttttgtcattaagtgtttaagtgttattctgaattttctaccttagttatcattaatgtagttcctcattgaacatgtgataatctaatacctgtgaaaactgactaatcagctgccaataatatctaatatttttcatcatgcacgaattaataatcatcatactctagaatcttgtctgtcactcactacatgaataagcaaatattgtcttcaaaagaatgcacaagaaccacaattaagatgtcatattattttgaaagtacaaaatatactaaaagagtgtgtgtgtattcacgcagttactcgcttccatttttatgacctttcaactataggtaataactcttagagaaattaatttaatattagaatttctattatgaatcatgtgaaagcatgacattcgttcacaatagcactattttaaataaattataagctttaaggtacgaagtatttaatagatctaatcaaatatgttgattcatggctataataaagcaggagcaattataaaatcttcaatcaattgaacttttacaaaaccacttgagaatttcatgagcactttaaaatctgaactttcaaagcttgctattaaatcatttagaatgtttacatttactaaggtgtgctgggtcatgtaaaatattagacactaatattttcatagaaattaggctggagaaagaaggaagaaatggttttcttaaatacctacaaaaaagttactgtggtatctatgagttatcatcttagctgtgttaaaaatgaatttttactatggcagatatggtatggatcgtaaaattttaagcactaaaaattttttcataacctttcataataaagtttaataataggtttattaactgaatttcattagttttttaaaagtgtttttggtttgtgtatatatacatatacaaatacaacatttacaataaataaaatacttgaaattctcttttgtgtctcctagtagcttcctactcaactatttataatctcattaattaaaaagttataattttagataaaaattctagtcaaatttttacagatattatctcactaattttcagacttttgccaaagtgtgcacaatggctttttgttaataaagaacagattagttttgaagaaggcaaaaatttcagttttctgaagacagcatgttattttaacaatcaagtatacatattaaaaattgtgagcaatctcaaaaaaaaaaaaaaa

SEQ ID NO: 12 - DNA, 4005 bp, Homo sapiens
cggcagggttggaaaatgatggaagaggcggaggtggaggcgaccgagtgctgagaggaacctgcggaatcggccgagatggggtctggcgcgcgctttccctcggggacccttcgtgtccggtggttgctgttgcttggcctggtgggcccagtcctcggtgcggcgcggccaggctttcaacagacctcacatctttcttcttatgaaattataactccttggagattaactagagaaagaagagaagcccctaggccctattcaaaacaagtatcttatgttattcaggctgaaggaaaagagcatattattcacttggaaaggaacaaagaccttttgcctgaagattttgtggtttatacttacaacaaggaagggactttaatcactgaccatcccaatatacagaatcattgtcattatcggggctatgtggagggagttcataattcatccattgctcttagcgactgttttggactcagaggattgctgcatttagagaatgcgagttatgggattgaacccctgcagaacagctctcattttgagcacatcatttatcgaatggatgatgtctacaaagagcctctgaaatgtggagtttccaacaaggatatagagaaagaaactgcaaaggatgaagaggaagagcctcccagcatgactcagctacttcgaagaagaagagctgtcttgccacagacccggtatgtggagctgttcattgtcgtagacaaggaaaggtatgacatgatgggaagaaatcagactgctgtgagagaagagatgattctcctggcaaactacttggatagtatgtatattatgttaaatattcgaattgtgctagttggactggagatttggaccaatggaaacctgatcaacatagttgggggtgctggtgatgtgctggggaacttcgtgcagtggcgggaaaagtttcttatcacacgtcggagacatgacagtgcacagctagttctaaagaaaggttttggtggaactgcaggaatggcatttgtgggaacagtgtgttcaaggagccacgcaggcgggattaatgtgtttggacaaatcactgtggagacatttgcttccattgttgctcatgaattgggtcataatcttggaatgaatcacgatgatgggagagattgttcctgtggagcaaagagctgcatcatgaattcaggagcatcgggttccagaaactttagcagttgcagtgcagaggactttgagaagttaactttaaataaaggaggaaactgccttcttaatattccaaagcctgatgaagcctatagtgctccctcctgtggtaataagttggtggacgctggggaagagtgtgactgtggtactccaaaggaatgtgaattggacccttgctgcgaaggaagtacctgtaagcttaaatcatttgctgagtgtgcatatggtgactgttgtaaagactgtcggttccttccaggaggtactttatgccgaggaaaaaccagtgagtgtgatgttccagagtactgcaatggttcttctcagttctgtcagccagatgtttttattcagaatggatatccttgccagaataacaaagcctattgctacaacggcatgtgccagtattatgatgctcaatgtcaagtcatctttggctcaaaagccaaggctgcccccaaagattgtttcattgaagtgaattctaaaggtgacagatttggcaattgtggtttctctggcaatgaatacaagaagtgtgccactgggaatgctttgtgtggaaagcttcagtgtgagaatgtacaagagatacctgtatttggaattgtgcctgctattattcaaacgcctagtcgaggcaccaaatgttggggtgtggatttccagctaggatcagatgttccagatcctgggatggttaacgaaggcacaaaatgtggtgctggaaagatctgtagaaacttccagtgtgtagatgcttctgttctgaattatgactgtgatgttcagaaaaagtgtcatggacatgggaaatgaatactgcattgagggacggacttctggtcttcttcttcctaattgttccccttattgtctgtgctatttttatcttcatcaagagggatcaactgtggagaagctacttcagaaagaagagatcacaaacatatgagtcagatggcaaaaatcaagcaaacccttctagacagccggggagtgttcctcgacatgtttctccagtgacacctcccagagaagttcctatatatgcaaacagatttgcagtaccaacctatgcagccaagcaacctcagcagttcccatcaaggccacctccaccacaaccgaaagtatcatctcagggaaacttaattcctgcccgtcctgctcctgcacctcctttatatagttccctcacttgatttttttaaccttctttttgcaaatgtcttcagggaactgagctaatactttttttttttcttgatgttttcttgaaaagcctttctgttgcaactatgaatgaaaacaaaacaccacaaaacagacttcactaacacagaaaaacagaaactgagtgtgagagttgtgaaatacaaggaaatgcagtaaagccagggaatttacaataacatttccgtttccatcattgaataagtcttattcagtcatcggtgaggttaatgcactaatcatggattttttgaacatgttattgcagtgattctcaaattaactgtattggtgtaagatttttgtcattaagtgtttaagtgttattctgaattttctaccttagttatcattaatgtagttcctcattgaacatgtgataatctaatacctgtgaaaactgactaatcagctgccaataatatctaatatttttcatcatgcacgaattaataatcatcatactctagaatcttgtctgtcactcactacatgaataagcaaatattgtcttcaaaagaatgcacaagaaccacaattaagatgtcatattattttgaaagtacaaaatatactaaaagagtgtgtgtgtattcacgcagttactcgcttccatttttatgacctttcaactataggtaataactcttagagaaattaatttaatattagaatttctattatgaatcatgtgaaagcatgacattcgttcacaatagcactattttaaataaattataagctttaaggtacgaagtatttaatagatctaatcaaatatgttgattcatggctataataaagcaggagcaattataaaatcttcaatcaattgaacttttacaaaaccacttgagaatttcatgagcactttaaaatctgaactttcaaagcttgctattaaatcatttagaatgtttacatttactaaggtgtgctgggtcatgtaaaatattagacactaatattttcatagaaattaggctggagaaagaaggaagaaatggttttcttaaatacctacaaaaaagttactgtggtatctatgagttatcatcttagctgtgttaaaaatgaatttttactatggcagatatggtatggatcgtaaaattttaagcactaaaaattttttcataacctttcataataaagtttaataataggtttattaactgaatttcattagttttttaaaagtgtttttggtttgtgtatatatacatatacaaatacaacatttacaataaataaaatacttgaaattctcttttgtgtctcctagtagcttcctactcaactatttataatctcattaattaaaaagttataattttagataaaaattctagtcaaatttttacagatattatctcactaattttcagacttttgccaaagtgtgcacaatggctttttgttaataaagaacagattagttttgaagaaggcaaaaatttcagttttctgaagacagcatgttattttaacaatcaagtatacatattaaaaattgtgagcaatctcaaaaaaaaaaaaaaa

SEQ ID NO: 13 - DNA, 4670 bp, Homo sapiens
gcactcgctggaaagcggctccgagccaggggctattgcaaagccagggtgcgctaccggacggagaggggagagccctgagcagagtgagcaacatcgcagccaaggcggaggccgaagaggggcgccaggcaccaatctccgcgttgcctcagccccggaggcgccccagagcgcttcttgtcccagcagagccactctgcctgcgcctgcctctcagtgtctccaactttgcgctggaagaaaaacttcccgcgcgccggcagaactgcagcgcctccttttagtgactccgggagcttcggctgtagccggctctgcgcgcccttccaacgaataatagaaattgttaattttaacaatccagagcaggccaacgaggctttgctctcccgacccgaactaaaggtccctcgctccgtgcgctgctacgagcggtgtctcctggggctccaatgcagcgagctgtgcccgaggggttcggaaggcgcaagctgggcagcgacatggggaacgcggagcgggctccggggtctcggagctttgggcccgtacccacgctgctgctgctcgccgcggcgctactggccgtgtcggacgcactcgggcgcccctccgaggaggacgaggagctagtggtgccggagctggagcgcgccccgggacacgggaccacgcgcctccgcctgcacgcctttgaccagcagctggatctggagctgcggcccgacagcagctttttggcgcccggcttcacgctccagaacgtggggcgcaaatccgggtccgagacgccgcttccggaaaccgacctggcgcactgcttctactccggcaccgtgaatggcgatcccagctcggctgccgccctcagcctctgcgagggcgtgcgcggcgccttctacctgctgggggaggcgtatttcatccagccgctgcccgccgccagcgagcgcctcgccaccgccgccccaggggagaagccgccggcaccactacagttccacctcctgcggcggaatcggcagggcgacgtcggcggcacgtgcggggtcgtggacgacgagccccggccgactgggaaagcggagaccgaagacgaggacgaagggactgagggcgaggacgaaggggctcagtggtcgccgcaggacccggcactgcaaggcgtaggacagcccacaggaactggaagcataagaaagaagcgatttgtgtccagtcaccgctatgtggaaaccatgcttgtggcagaccagtcgatggcagaattccacggcagtggtctaaagcattaccttctcacgttgttttcggtggcagccagattgtacaaacaccccagcattcgtaattcagttagcctggtggtggtgaagatcttggtcatccacgatgaacagaaggggccggaagtgacctccaatgctgccctcactctgcggaacttttgcaactggcagaagcagcacaacccacccagtgaccgggatgcagagcactatgacacagcaattcttttcaccagacaggacttgtgtgggtcccagacatgtgatactcttgggatggctgatgttggaactgtgtgtgatccgagcagaagctgctccgtcatagaagatgatggtttacaagctgccttcaccacagcccatgaattaggccacgtgtttaacatgccacatgatgatgcaaagcagtgtgccagccttaatggtgtgaaccaggattcccacatgatggcgtcaatgctttccaacctggaccacagccagccttggtctccttgcagtgcctacatgattacatcatttctggataatggtcatggggaatgtttgatggacaagcctcagaatcccatacagctcccaggcgatctccctggcacctcgtacgatgccaaccggcagtgccagtttacatttggggaggactccaaacactgccccgatgcagccagcacatgtagcaccttgtggtgtaccggcacctctggtggggtgctggtgtgtcaaaccaaacacttcccgtgggcggatggcaccagctgtggagaagggaaatggtgtatcaacggcaagtgtgtgaacaaaaccgacagaaagcattttgatacgccttttcatggaagctggggaatgtgggggccttggggagactgttcgagaacgtgcggtggaggagtccagtacacgatgagggaatgtgacaacccagtcccaaagaatggagggaagtactgtgaaggcaaacgagtgcgctacagatcctgtaaccttgaggactgtccagacaataatggaaaaacctttagagaggaacaatgtgaagcacacaacgagttttcaaaagcttcctttgggagtgggcctgcggtggaatggattcccaagtacgctggcgtctcaccaaaggacaggtgcaagctcatctgccaagccaaaggcattggctacttcttcgttttgcagcccaaggttgtagatggtactccatgtagcccagattccacctctgtctgtgtgcaaggacagtgtgtaaaagctggttgtgatcgcatcatagactccaaaaagaagtttgataaatgtggtgtttgcgggggaaatggatctacttgtaaaaaaatatcaggatcagttactagtgcaaaacctggatatcatgatatcatcacaattccaactggagccaccaacatcgaagtgaaacagcggaaccagaggggatccaggaacaatggcagctttcttgccatcaaagctgctgatggcacatatattcttaatggtgactacactttgtccaccttagagcaagacattatgtacaaaggtgttgtcttgaggtacagcggctcctctgcggcattggaaagaattcgcagctttagccctctcaaagagcccttgaccatccaggttcttactgtgggcaatgcccttcgacctaaaattaaatacacctacttcgtaaagaagaagaaggaatctttcaatgctatccccactttttcagcatgggtcattgaagagtggggcgaatgttctaagtcatgtgaattgggttggcagagaagactggtagaatgccgagacattaatggacagcctgcttccgagtgtgcaaaggaagtgaagccagccagcaccagaccttgtgcagaccatccctgcccccagtggcagctgggggagtggtcatcatgttctaagacctgtgggaagggttacaaaaaaagaagcttgaagtgtctgtcccatgatggaggggtgttatctcatgagagctgtgatcctttaaagaaacctaaacatttcatagacttttgcacaatggcagaatgcagttaagtggtttaagtggtgttagctttgagggcaaggcaaagtgaggaagggctggtgcagggaaagcaagaaggctggagggatccagcgtatcttgccagtaaccagtgaggtgtatcagtaaggtgggattatgggggtagatagaaaaggagttgaatcatcagagtaaactgccagttgcaaatttgataggatagttagtgaggattattaacctctgagcagtgatatagcataataaagccccgggcattattattattatttcttttgttacatctattacaagtttagaaaaaacaaagcaattgtcaaaaaaagttagaactattacaacccctgtttcctggtacttatcaaatacttagtatcatgggggttgggaaatgaaaagtaggagaaaagtgagattttactaagacctgttttactttacctcactaacaatggggggagaaaggagtacaaataggatctttgaccagcactgtttatggctgctatggtttcagagaatgtttatacattatttctaccgagaattaaaacttcagattgttcaacatgagagaaaggctcagcaacgtgaaataacgcaaatggcttcctctttccttttttggaccatctcagtctttatttgtgtaattcattttgaggaaaaaacaactccatgtatttattcaagtgcattaaagtctacaatggaaaaaaagcagtgaagcattagatgctggtaaaagctagaggagacacaatgagcttagtacctccaacttcctttctttcctaccatgtaaccctgctttgggaatatggatgtaaagaagtaacttgtgtctcatgaaaatcagtacaatcacacaaggaggatgaaacgccggaacaaaaatgaggtgtgtagaacagggtcccacaggtttggggacattgagatcacttgtcttgtggtggggaggctgctgaggggtagcaggtccatctccagcagctggtccaacagtcgtatcctggtgaatgtctgttcagctcttctgtgagaatatgattttttccatatgtatatagtaaaatatgttactataaattacatgtactttataagtattggtttgggtgttccttccaagaaggactatagttagtaataaatgcctataataacatatttatttttatacatttatttctaatgaaaaaaacttttaaattatatcgcttttgtggaagtgcatataaaatagagtatttatacaatatatgttactagaaataaaagaacacttttggaaaaaaaaaaaaaaaaaaaaa

SEQ ID NO: 14 - DNA, 4410 bp, Homo sapiens
agttctagctgatcagtgctacctgtgctctggaaacccgctctgcgttcctgctggaggtggcctcccctccgccccagacaagaagaggccctcagccctcccccggtctcagagagccctgagaggaggcccagtccagagctcttcctccgttcccagtccacttctctagggccagtagcagacaccagccagtatgccgaggaaccagggcttctccgagcccgaatactcggccgagtactcagccgagtactccgtcagcctgccctccgaccctgaccgcggggtgggccggacccatgaaatctcggtccggaactcgggctcctgcctgtgcctgcctcgcttcatgcggctgactttcgtgccggagtccttggagaacctctaccagacctacttcaaaaggcagcgccacgagaccctgctggtgctggtggtctttgcagccctctttgactgctacgtggtggtcatgtgtgctgtggtcttctccagcgacaagctggcttccctcgccgtggctggaattggactggtgttggacatcatcctcttcgtgctctgcaaaaaggggctgctcccggaccgggtcacccgcagagtgctgccctacgtgctgtggctgctcataaccgcccagatcttctcctacctgggcctgaacttcgcgcgtgcccacgcggctagtgacacggtgggctggcaggtcttctttgtcttctccttcttcatcacgctgcccctcagcctcagccccatcgtgatcatctccgtggtctcctgtgtggtgcacacgttggtcctgggggtcaccgtggcccagcagcagcaggaggagctcaaggggatgcagctgctgcgggagatcctggccaacgtcttcctctacctgtgcgccatcgctgtgggcatcatgtcctactacatggctgaccgcaagcaccgcaaggccttcctggaggcccgccagtcgctggaggtgaagatgaacctggaagagcagagccagcagcaggagaacctcatgctttccatcctgcccaagcacgtggctgacgagatgctgaaagacatgaagaaagacgagagccagaaggaccagcagcagttcaacaccatgtacatgtaccgtcacgagaacgtcagcatcctctttgccgacatcgtgggctttacccagctgtcttctgcctgcagtgcccaggagcttgtgaagctgctcaacgagctctttgcccgctttgacaagctggcagctaaataccaccagctgcggattaagatcctgggcgactgctactactgcatctgcggcttgcccgactaccgggaggaccacgccgtctgctccatcctcatggggctggccatggtggaggccatctcgtatgtgcgggagaagaccaagactggggtggacatgcgtgtgggggtgcacacgggcaccgtgctggggggcgtcctgggccagaagcgctggcagtacgacgtgtggtcgactgatgtcactgtagccaacaagatggaggccggcggcatccctgggcgcgtgcacatctcccagagcaccatggactgcctgaaaggggagtttgatgtggagccaggcgatgggggcagccgctgtgattacctagaagagaagggtattgaaacctacctcatcattgcctccaagccagaggtgaagaaaacagccacccagaatggcctcaatggctcggccctgcccaatggagcaccagcttcctcaaagtccagctcccctgccctcattgagaccaaggagcccaacgggagtgcccacagcagtgggtccacgtcggagaagcccgaggagcaggatgcccaggccgacaacccctcattccccaacccacgccggaggctgcgcctgcaggacctggctgaccgagtggtggatgcctctgaagatgagcacgagctcaaccagctgctcaacgaggccctgcttgagcgagagtccgcccaagtagtaaagaagagaaacaccttcctcttgtccatgcggttcatggaccccgagatggaaacccgctactcggtggagaaggagaagcagagtggggctgccttcagctgctcctgcgtcgtcctgctctgcacggccctggtcgagatactcatcgacccctggctaatgacaaactatgtgaccttcatggtgggggagattctgctcctcatcctgaccatctgctccctggctgccatctttccccgggcctttcctaagaagcttgtggccttctcaacttggattgaccggacccgctgggccaggaacacctgggccatgctcgccatcttcatcctggtgatggcaaatgtcgtggacatgctcagctgtctccagtactacacgggacccagcaatgcaacggcagggatggaaacggagggcagctgcctggagaaccccaagtattacaactatgtggccgtgctgtccctcatcgccaccatcatgctggtgcaggtcagccacatggtgaagctcacgctcatgctgctcgtcgcaggcgccgtggccaccatcaacctctatgcctggcgtcccgtctttgatgaatacgaccacaagcgttttcgggagcacgacttacctatggtggccttagagcagatgcaaggattcaaccctgggctcaatggcactgacaggctgcccctggtgccttccaagtactctatgacggtgatggtgttcctcatgatgctcagcttctactacttctcccgccacgtagaaaaactggcacggacacttttcttgtggaagattgaggtccacgaccagaaggaacgtgtctatgagatgcgacgctggaacgaggccttggtcaccaacatgttgcctgagcacgtggcacgccatttcctggggtccaagaagagagatgaggagctgtatagccagacgtatgatgagattggagtcatgtttgcctccctgcccaactttgctgacttctacacagaggagagcatcaacaatggtggtattgagtgtctgcgtttcctcaatgaaatcatctcagattttgactctctcctggacaatcccaagttccgggtgatcaccaagatcaaaaccattggcagcacgtatatggcggcttcaggagtcacccccgatgtcaacaccaatggctttgccagctccaacaaggaagacaagtccgagagagagcgctggcagcacctggctgacctggccgacttcgcgctggccatgaaggatacgctcaccaacatcaacaaccagtccttcaataacttcatgctgcgcataggcatgaacaaaggcggggttctggctggggtcatcggagcccggaaaccacactacgacatctggggcaatacagtcaatgtagccagcaggatggagtccacgggggtcatgggcaacattcaggtggtagaagaaacccaagtcatcctccgagagtacggcttccgctttgtgaggcgaggccccatctttgtgaaggggaagggggagctgctgaccttcttcttgaaggggcgggataagctagccaccttccccaatggcccctctgtcacactgccccaccaggtggtggacaactcctgaatggcctcgagcctgcaacagtccaaaccggaagggagaatttattttttgaaactgaaggaagtcccgaccttcctggattgaagtgcacactcatggactttaggtttagaaacctcctcagccttcatttgttcgtggatgtgtgagctctgagggtggccctgctattcctgtgtgtgcctgtagtgtccccagcataggggtcttaggcatagggctgaacagtccttccagagccctcgttccaatccctgccgtccttgcccctgaggggccctgaccactgtgagcaggagggtggcagagctgggacaaagctgcctttgccgctgggctttccgggactgtggagggagcacaggcggggaagctccacttcagacagggcttggtggggcaggacatggctcccattttgaagggaggtctccatgtggtccgagtgaggtgagacggccctcgtcctggtgttcctgatcatcttgaaaggttcttctggaactcctgtccccttagtcatgagaacagaaagtgcaatatttcctttcacctggcaggggaggggggatttatttctgaaagaaaaatatataaacagatcttctacatttatatttttaatcttctgttaaatacactttccgatattgccttgccttttgagctcttgctacagtcgcctttgctactgctttaagagaatttacaggtattgataaagaacaagactgttttattaaaagctttattcaacttgaaaaaaaaaaaaaaaa

SEQ ID NO: 15 - DNA, 1449 bp, Homo sapiens
ctggatagaacagctcaagccttgccacttcgggcttctcactgcagctgggcttggacttcggagttttgccattgccagtgggacgtctgagactttctccttcaagtacttggcagatcactctcttagcagggtctgcgcttcgcagccgggatgaagctggtttccgtcgccctgatgtacctgggttcgctcgccttcctaggcgctgacaccgctcggttggatgtcgcgtcggagtttcgaaagaagtggaataagtgggctctgagtcgtgggaagagggaactgcggatgtccagcagctaccccaccgggctcgctgacgtgaaggccgggcctgcccagacccttattcggccccaggacatgaagggtgcctctcgaagccccgaagacagcagtccggatgccgcccgcatccgagtcaagcgctaccgccagagcatgaacaacttccagggcctccggagctttggctgccgcttcgggacgtgcacggtgcagaagctggcacaccagatctaccagttcacagataaggacaaggacaacgtcgcccccaggagcaagatcagcccccagggctacggccgccggcgccggcgctccctgcccgaggccggcccgggtcggactctggtgtcttctaagccacaagcacacggggctccagcccccccgagtggaagtgctccccactttctttaggatttaggcgcccatggtacaaggaatagtcgcgcaagcatcccgctggtgcctcccgggacgaaggacttcccgagcggtgtggggaccgggctctgacagccctgcggagaccctgagtccgggaggcaccgtccggcggcgagctctggctttgcaagggcccctccttctgggggcttcgcttccttagccttgctcaggtgcaagtgccccagggggcggggtgcagaagaatccgagtgtttgccaggcttaaggagaggagaaactgagaaatgaatgctgagacccccggagcaggggtctgagccacagccgtgctcgcccacaaactgatttctcacggcgtgtcaccccaccagggcgcaagcctcactattacttgaactttccaaaacctaaagaggaaaagtgcaatgcgtgttgtacatacagaggtaactatcaatatttaagtttgttgctgtcaagattttttttgtaacttcaaatatagagatatttttgtacgttatatattgtattaagggcattttaaaagcaattatattgtcctcccctattttaagacgtgaatgtctcagcgaggtgtaaagttgttcgccgcgtggaatgtgagtgtgtttgtgtgcatgaaagagaaagactgattacctcctgtgtggaagaaggaaacaccgagtctctgtataatctatttacataaaatgggtgatatgcgaacagcaaacc

SEQ ID NO: 16 - DNA, 2041 bp, Homo sapiens
aattgttcggcgatcgctggctgccgggacttttctcgcgctggtctcttcggtggtcagggatggcgcggaagtcgaacttgcctgtgcttctcgtgccgtttctgctctgccaggccctagtgcgctgctccagccctctgcccctggtcgtcaacacttggccctttaagaatgcaaccgaagcagcgtggagggcattagcatctggaggctctgccctggatgcagtggagagcggctgtgccatgtgtgagagagagcagtgtgacggctctgtaggctttggaggaagtcctgatgaacttggagaaaccacactagatgccatgatcatggatggcactactatggatgtaggagcagtaggagatctcagacgaattaaaaatgctattggtgtggcacggaaagtactggaacatacaacacacacacttttagtaggagagtcagccaccacatttgctcaaagtatggggtttatcaatgaagacttatctaccagtgcttctcaagctcttcattcagattggcttgctcggaattgccagccaaattattggaggaatgttataccagatccctcaaaatactgcggaccctacaaaccacctggtatcttaaagcaggatattcctatccataaagaaacagaagatgatcgtggtcatgacactattggcatggttgtaatccataagacaggacatattgctgctggtacatctacaaatggtataaaattcaaaatacatggccgtgtaggagactcaccaatacctggagctggagcctatgctgacgatactgcaggggcagccgcagccactgggaatggtgatatattgatgcgcttcctgccaagctaccaagctgtagaatacatgagaagaggagaagatccaaccatagcttgccaaaaagtgatttcaagaatccagaagcattttccagaattctttggggctgttatatgtgccaatgtgactggaagttacggtgctgcttgcaataaactttcaacatttactcagtttagtttcatggtttataattccgaaaaaaatcagccaactgaggaaaaagtggactgcatctaatccatctttactgtcaacatctgtatttaaagaagaaagaaacaaaggctgaaaaggctgctcactctcatcatctagtgttcctcatgtgttctaaagtctttttgtaaaataaacacaaaaataaatttatgttgaattggcactttctatatctgaaattgtattatctatttttatttaacctttcttatattatctgaagatgaatatgtatgtggctgtattttgtatatatttaagttttaagtgacacttggatttctgatcagtgttgcaaaaaattgctactttgagatttatttccacagtgatatattaaacccaaaaggaatcatcatatttggatgcttaaaatagagtatacaagttttttagacccaaagaaaaaaacagcagagtctcagcatgatcagtcctgattgaatttcattatgtcacagtgatgcatgtcttagcactgattattggttttacttaatattccctaaaaacttgaggaaggaagatgatagaacatgagatactctttgttttgtacatactagaaaatacagctatcttctgatgagcaattgtgttgattttctttgcttttttcctcttatggagctctcagtgtgtgaaagttctaaagccacaagaatcaatgatgttttagctgctaatatttagtattgatcgtttcttttaaaaatgatttggggaacttgatctgtactgtaattttactaattccttgtgcagaggtgggtatggcaattagaagtcaagaaatgggttgtttagcttggtttgtttccctaacttctgattaactctctgtatgacaactctacagaagttgtgcgcgtgctttctcagcagcatttttccttcaaaatcatctttttaatcaacagtcattaataaatgtacatgtacgatattcaaacttt

SEQ ID NO: 17 - DNA, 3411 bp, Homo sapiens
cttctcttgtgtaatcagctgcctatttggaaattgggcagggtttgcgactggatgctaatgtcactgactagttttcagcctaccatccagaagtaacatgttcccagctttggaaacgcacctaaagcagactattcctgatccttatgaagactttatgtaccgtcacctccaatattatggctactttaaagctcagagaggcagtttaccaaactctgctacgcatcagcatgttcggaagaataaccctcaatgcctgttgaatggctctcttggggaaaaagatgatttgataccagacaccctgcaaaaggagaagcttctatggcctatcagtttatcttcagctgtgcacagacagatagaagccatcaacagagactttcactcttgcctgggctggatgcagtggcgcggcctcagctcactgcaacctccacctcccagattcaaggattctcctgcctcagctttccgagtagctgggattacagattcacatatgctgagtttaccacatcttaggagcagacagcttctttatgatgagttggatgaagtaaacccacgtcttcgagaaccccaagagctcttttccattttgtctaccaagaggccactgcaggctccaagatggccaattgaatgtgaggtcatcaaggaaaacatccatcatattgagtgggctccacctcaaccagaatatttctatcagcctaaaggaaatgaaaaggtaccagagattgtaggagagaaaaaaggaacagttgtctatcaattagattcagtgcctatagaaggttcctattttaccagttccagagtgggaggcaaacgaggaattgtcaaggaacttgctgtcacgttgcaaggaccagaagataatactctactgtttgaatcaaggtttgagagtgggaatctgcaaaaagctgtcagagtagacacctatgagtatgaactcaccttgcgaactgacctctacactaacaaacacactcagtggttttattttcgtgttcagaacaccagaaaagatgctacctatcgcttcaccattgtcaacttgctaaaacccaagagtctttatactgtagggatgaagccactcttgtactcccaattggatgccaacacccgcaatattggctggaggagagaaggaaatgaaatcaagtactacaagaacaacacggatgatgggcagcagcccttctactgtctcacgtggaccattcagtttccatatgaccaggacacttgcttctttgcacacttctacccatatacatacactgatttgcaatgctacctcctgtcagtggcaaacaaccctatccagtctcagttctgcaagctccaaactttatgcaggagcctagcaggaaataccgtttacttgctcaccatcaccaacccatcccagacccctcaagaggcagctgcaaagaaagctgtggtcttgagtgccagagttcaccctggagaaagtaatggctcctgggttatgaaaggctttttggacttcatccttagcaactccccagatgcccagctcctcagagatatttttgtcttcaaggtgcttcccatgttaaatccagatggtgtgattgtggggaattatcggtgttccttggccggaagggatttgaacaggcattataaaaccattctgaaggagtctttcccttgtatttggtacaccaggaacatgatcaaaagacttcttgaagaaagagaggttctgttgtattgtgatttccatggccacagtcgtaagaataatatcttcctgtatggctgtaataacaacaatcgcaaatactggcttcatgaacgagtctttcctttaatgttatgcaaaaatgcaccagataagttctcttttcacagttgtaattttaaggtccaaaaatgcaaagaaggaacaggacgagttgttatgtggcggatgggaatcctaaacagctacaccatggagtctacctttggcgggtccaccctgggtaataaaagagacacccactttaccatcgaagatctgaagtccttaggttatcatgtctgtgacacccttctggacttttgtgatcctgaccaaatgaagttcactcagtgtctagcagagcttaaggagcttttacgacaggaaatccacaagaaattccatgaacttggacaagatgtagatttagaaggaagttggagtgacatctctttgtctgacattgaatccagcaccagtggctctgacagttctctctcagatggtcttcctgttcacctagcaaacatagcagatgagctgactcagaaaaagaagatgtttaagaagaaaaaaaagaagtcacttcagactaggaaacagcgaaatgagcagtatcagaaaaaaaatttgatgcagaagttaaagttaacagaagatacctcagaaaaggcaggatttgcttctactctgcaaaagcagccaacctttttcaaaaactcagagaattccagttttttaccaatgaaaaatgaaaacccaaggttaaatgagacaaatttaaatagaagagacaaagacacccccctggacccatcaatggccaccctgattctgcctaagaataaagggagaatgcagaataagaagccaggctttacagtatcatgctctccaaagagaaccataaactccagccaagagccagctccaggtatgaagccaaactggcctaggagcagatatcctgccacaaagagaggctgtgctgccatggcggcatacccatccttgcacatatacacatacccgtaggtgagcctgggctgtgccacacaagcacttcatcgggggttttgagattagacacattttataatgggggagatgtatgactgggaactgcatttacttgtggtatactgtgttgtgcactcatgcactgaccttacactttgtacttacactgtgggcatgtggtcaagatgcatacctcatgaattcaactattttttcataaaatgaaattttattatgatgtgtaaaaatgctttatcagaaactgaagtgtgttctcatggcacacttcatggcagcacagatatacctcattttaaccaatagatattctctctaaaattatgtgcaaatcaatttttaaaaatcaaaatctatgttaaacacattttggcagtgtgctataataaaaaaaagtgttgtgtcaaagctttctagtgacggtcagtcctactgctgtatgtcaggtttgctcacaatgaggtattcccacatagaaataacaatgcatgtattacccagaatttaatgttgcgtaccttatgttcaatgaggttttgtaatttttttaggctgatgattaaaattctttctctctaaaaaaaaaaaaaaaaaaaaaa

SEQ ID NO: 18 - DNA, 2192 bp, Homo sapiens
gtgcacaggcagcctgggaacagctccatccccacccctcagctataaatagggcatcgtgacccggccgggggaagaagctgccgttgttctgggtactacagcagaagggtatgcggaagcgagcaccccagtctgagatggctcctgccggtgtgagcctgagggccaccatcctctgcctcctggcctgggctggcctggctgcaggtgaccgggtgtacatacaccccttccacctcgtcatccacaatgagagtacctgtgagcagctggcaaaggccaatgccgggaagcccaaagaccccaccttcatacctgctccaattcaggccaagacatcccctgtggatgaaaaggccctacaggaccagctggtgctagtcgctgcaaaacttgacaccgaagacaagttgagggccgcaatggtcgggatgctggccaacttcttgggcttccgtatatatggcatgcacagtgagctatggggcgtggtccatggggccaccgtcctctccccaacggctgtctttggcaccctggcctctctctatctgggagccttggaccacacagctgacaggctacaggcaatcctgggtgttccttggaaggacaagaactgcacctcccggctggatgcgcacaaggtcctgtctgccctgcaggctgtacagggcctgctagtggcccagggcagggctgatagccaggcccagctgctgctgtccacggtggtgggcgtgttcacagccccaggcctgcacctgaagcagccgtttgtgcagggcctggctctctatacccctgtggtcctcccacgctctctggacttcacagaactggatgttgctgctgagaagattgacaggttcatgcaggctgtgacaggatggaagactggctgctccctgatgggagccagtgtggacagcaccctggctttcaacacctacgtccacttccaagggaagatgaagggcttctccctgctggccgagccccaggagttctgggtggacaacagcacctcagtgtctgttcccatgctctctggcatgggcaccttccagcactggagtgacatccaggacaacttctcggtgactcaagtgcccttcactgagagcgcctgcctgctgctgatccagcctcactatgcctctgacctggacaaggtggagggtctcactttccagcaaaactccctcaactggatgaagaaactatctccccggaccatccacctgaccatgccccaactggtgctgcaaggatcttatgacctgcaggacctgctcgcccaggctgagctgcccgccattctgcacaccgagctgaacctgcaaaaattgagcaatgaccgcatcagggtgggggaggtgctgaacagcattttttttgagcttgaagcggatgagagagagcccacagagtctacccaacagcttaacaagcctgaggtcttggaggtgaccctgaaccgcccattcctgtttgctgtgtatgatcaaagcgccactgccctgcacttcctgggccgcgtggccaacccgctgagcacagcatgaggccagggccccagaacacagtgcctggcaaggcctctgcccctggcctttgaggcaaaggccagcagcagataacaaccccggacaaatcagcgatgtgtcacccccagtctcccaccttttcttctaatgagtcgactttgagctggaaagcagccgtttctccttggtctaagtgtgctgcatggagtgagcagtagaagcctgcagcggcacaaatgcacctcccagtttgctgggtttattttagagaatgggggtggggaggcaagaaccagtgtttagcgcgggactactgttccaaaaagaattccaaccgaccagcttgtttgtgaaacaaaaaagtgttcccttttcaagttgagaacaaaaattgggttttaaaattaaagtatacatttttgcattgccttcggtttgtatttagtgtcttgaatgtaagaacatgacctccgtgtagtgtctgtaataccttagttttttccacagatgcttgtgatttttgaacaatacgtgaaagatgcaagcacctgaatttctgtttgaatgcggaaccatagctggttatttctcccttgtgttagtaataaacgtcttgccacaataagcctccaaaaaaaa

SEQ ID NO: 19 - DNA, 2157 bp, Homo sapiens
ggggtctgtgcggggccgcggggccagggggtcagggggccgccccccctcagctgctggacgcagggctcggccttcgcctctgggctcgggagagtccttgagtacggagaccggctaggagggttgcagctgcctctttttgaaagttgggttgggccccaagagtgacttccgacagacctttccactcccaccgtctgtggcctgagggccttcccttctcctcccgcccacccctctggatgtttcggggagttagaagggagctggattgagagactgtgttaggggcgggggtatggaacgtagtggaaagggcagaaatttggatctcagttcgcgcccaccccgcaggcgcctcccgcgagccgggccctctgtgagtgagacaagctccccttcctttacgcgcctcacctggcgcgtggggagaggtcggcagccctccgccgcagaacctccggaagggatgtcctctgccctgcgcctctggccggggctgtggtccctccaggccgtcgaggggatgctgaggccggtccccagaggagcatgacttggctggtccggaggagctctgagggcatgggcaatcttggctcgctgcaacctcagcttccagagttcaagcgagtctcctgcttcagcctcatgagtagctgggactacagatgcgtgccactacgtccgtctgatgtttgtatttttagtagagacagggtttcaccatgttggtcaggctgctctcgaactccagatctcgtgatccgcccgcctgggcctactaaagtgctgggattacaggcgtgagctagatctgactttctagtgtcctagccttggcccgatggacatgtcatttctctcagctcgtttctgtcccctaaagtgagaatattgcctgggaagattacattagacgatgtatatgcgaagacacttgatagctggtattgtcatgattctgattagttcactactgctactttccctgtggcctaggctttgcctatttccagtgggcgagctagctagatcctcctcccttaaataagccagtgtttttaagacagaatactacttgcatagtggacaataatatcttaaagaactgagcaggatgaaaagaatttgatagaaagcaggtttgaggagcacattggaggttggcaggtttcgaggctgcttgagaggacttgggccgatctgggctgggcttggacgtgaccctggcacccaggcaggtggatcccagctggggcttccattcacgactttctggtccctggcaggacagagcgggatgccaccagcttgcccaaagggaagttccaggagctcctggtgggcatcgttgtggagaatgacgctggccgcggcgagatcaacgagttgaagcaggtggaaggggaggcttcgtgcagcagccgcaaaggaaagctgattttcttctatgagtggaacatcaaactgggctggaaaggcatcgttaaagaatctggagtgaagcacaagggattgattgaaatacccaatctttctgaggaaaatgaagtagatgacactgagaatttacaacgggaatgattttaccaacgaaagctatggcaacccaggaattgactgtcaaaagaaaactgagtgggaataccctgcaggttcaggcctcatctccagtggcactgggtgtaaggattcccactgtggctcttcacatgatggaactgtttgacacaactgtagagcagctgtatagcatcttcactgtaaaggagttaacaaataagaagatcatcatgaaatggagatgtgggaactggccagaagaacactatgccatggttgcactgaattttgtgcctactctagggcaaacagaattacaattgaaggagttcctatctatctgtaaagaagagaacatgaaattctgttggcagaagcagcattttgaagaaataaaaggttcactgcagctgacccccctaaatggttgaattaaaatttattataaggcattactttttgtaagcggaaaaagtgtcacatttacctcttccctatcttttgtttaaaaggactgtctttattttatattggatgaaatctatgaacatatatacaatgtaaagcagaaaaaaaaaaaaaaaaaaa

SEQ ID NO: 20 - DNA, 2266 bp, Homo sapiens
gggaacgccggctcccggcatgccgcgcgctgacagccttataaatagtcgcctttgccggccgccgcgaggacgggcagggcacgcactggccccggcgcccacccgcacccctccccagagcactgacacggctcccgggacctcggcaggatggaagagaagctgaagaaaaccaagatcatctttgtggtgggtgggcctggctcagggaagggcacccagtgtgagaagatcgtgcagaagtatggctacacccacctctccaccggggacctcctgcggtccgaggtcagctcaggctcggccaggggcaagaagctgtcggaaatcatggagaaggggcagctggttccactggagacagtgttggacatgctccgggatgccatggtggccaaagtcaatacttccaaaggcttcctgattgatggctacccgcgggaggtgcagcaaggagaagagtttgagcgacggattggacagcccacactgctgctgtatgtggacgcaggccctgagaccatgacccagcggctcttgaaacgtggagagaccagcgggcgtgtggacgacaatgaggagaccatcaaaaagcggctggagacctattacaaggccacagaacccgtcatcgccttctatgagaaacgtggcattgtgcgcaaggtcaacgctgagggctccgtggacagtgtcttctcccaggtctgcacccacctggacgccctaaagtagcaacgctggagccgcttccccagctcagagccccgccccaccccgtcctgattcgaggtcctcctggcctgagcgcagcgcctccaccctgccctgctgagcacagacggaggaagccgcttatcctgttttcatggacagctgagcactaaaggaatttctaaggacatttggttttactgctttttctctgcttccagttggagttgattcatgtgcttgtgcctacctggccgcaagtccccagcccctcaaccctccgttcctcctcagcctccctttgccagccacccctcctctagctctggtgggaggcccggggcccttcctcgcacagggcatgcctggcctgaggacccggcgctgagtggcggggcccctgctccgaggggctcatgttcaggcagaaccggtcccagcctgggctcctctgcatcttgctctgtggccttggccctgacccccatcgctctgagcatatgttccatgcctggcccttgccggggcctggactgcacaggcagcaaggtcatggtctgagtggggcttcctgggcagttggggcggcccacgccagctggcccagtgggtagtgaattggcttccttgacgcgagaggctctgagggtctgaaaagggcatctcaatggcatgggtgggtggggagtcagtcatgtcactgaaattgaatgggggaggcccaatgaggtggctcatgcctgtaatcccagcactttgggaagctgaggcaggaggatcccctgaggtcaggagttcgagagcagcctggccaacatggcaaaaccccttatttactaaaaatacaaaaattagccgggcatggtggcatgtgcctgtattcccagctactcatgaggctgaggcaggagaatggcgtgaacccgggaggtggagcttgcaatgagccaagattgcgccactgcactccagcctgggtgacagagcaagactccgtctcaaaaaaaaaaaaaaaaaaaaagaaattgaattgggggagtcatggtcaggggtgagacctgaaggacctccccctgtgtggccctggacacagcccaccctctgtgagccgtttccaattctaaaacagactcaatgtccccctcacccccacctcaaggtcaggatgagaacacactgagtgaggagtggacgctgtccattgccacggccatgagggctggagaccagaacagcatggcccgaagcgtgcggggccccggatgacttggggacaccccagaatcccctggggagaacccttcctgcgcgctttcattttttgacctcatcactgagaaaggctcaatttggtgctcacgtgtccttaacacctgatctggcccaagctgggctccctttaagccaagagagcctcttgtggaccccgcctgcccgaatgaaatccgaacagttggggctgttcatggcaagtggggctggtttttcatttccattggttatttaaagtttcctttaaaataaacgattttaagttataaaaggtgaa

SEQ ID NO: 21 - DNA, 6866 bp, Homo sapiens
gcagatgcgctggccccagcccggggctgccgctcgccttcccccggagtctcctggacccccggagtctcctggacccccggagcgggaggcagcggccgcgcggcgctggactggagcagaaccccaggactgcgcccccgggagcgggcgcccagagaagcctccccagctttctgaggatgatatctggctaaaaagcgagggagacaactatagtgccaccctcctggagcctgctgccagctctctttccccagatcacaaaaacatggaaattgaggtgtctgttgcagaatgtaaaagtgttcctggaatcacctctaccccacatcccatggaccatccctccgctttctattcacccccgcataatggcctccttactgatcaccacgaatccctggataatgatgttgccagagagatccgctatctagatgaggtgctagaggccaactgctgtgattctgctgtggatggaacgtacaatggaacatcctccccagagcctggtgcagtggttctggtgggcggcctaagcccccctgtccacgaggcgacccagccagaacccactgaaagaacagctagccggcaggcacctcctcacatcgagctcagtaatagcagccctgaccccatggcagaggcagaaagaacaaatggccattcccccagccagcctagagatgcgctgggggacagcctgcaggtgcctgtcagccccagctccacaaccagctcacggtgttcttcccgagatggagagttcactctcaccacactgaaaaaggaggccaagtttgagctgcgtgccttccatgaggacaagaagccctccaagctctttgaggatgacgagcatgagaaagaacaatactgcattagaaaagtgaggccttcagaggagatgctggagctggaaaaggagaggagagagctcatccgcagccaggccgtcaagaagaatcctggcattgcagcaaaatggtggaatcccccgcaggaaaaaaccatcgaggagcagctggacgaggaacatctggagtcgcacaaaaagtacaaggagcgcaaagagagaagggcacagcaggaacagttgctgctgcagaagcagttacagcagcagcagcagcagcccccatcgcagctctgcacagcccctgcctcttctcatgaacgcgcaagcatgattgacaaagcaaaggaggacattgtcacagagcagatagatttctctgctgctcgcaaacaatttcagctgatggagaattccaggcaagcggtggccaagggccagagtacacccaggctgttctccatcaagcctttctacaggcctctggggtcagtcaactcagacaagccactgactaatccgagaccaccttctgtcgggggacctccagaagacagtggtgcctcagccgccaagggacagaaatcccccggtgccctggagaccccatcggcagcaggaagccagggcaacacagcctctcaggggaaggaagggccctacagcgagccttctaaacgtgggcccttatctaaactgtgggctgaggatggagaatttacgagcgcccgggctgtcctcactgtggtcaaggatgatgaccatgggattttggatcagttctcaagatctgtcaatgtctccttgacccaagaggagcttgactctggtctggacgaattgtcggtgaggtctcaggataccacagtcctggagaccctatccaatgatttcagcatggacaacatcagtgacagcggggcatccaatgagacaaccaatgccctccaggaaaattcactggctgatttttctctgccccagacaccacaaactgacaacccctcagagggccgaggagaaggcgtctccaagtcatttagtgatcatggtttctattccccttcctccacgctgggggactctccgttggttgatgaccccttggagtatcaggctggcctcctggtgcagaatgccattcaacaagccatagccgagcaggtggataaagctgtgtccaaaaccagcagggatggagcagagcaacagggacctgaagcgactgtagaggaagctgaagctgcggctttcggctcagaaaagcctcagagcatgtttgagccacctcaggtgtcttctcctgttcaagagaaaagggatgtattaccaaagattctgcctgctgaagacagggcgctcagggaaagggggcccccccagccactgccagctgtgcagcccagtggcccgattaacatggaggagaccaggcccgaaggaagctatttcagcaagtactcggaggcagctgagctgagaagcacagcctccctcctggccactcaagaatctgacgtgatggttgggcctttcaagctgaggtccaggaaacagcggactttgtccatgattgaggaagagatccgagcagctcaggaaagggaagaggagctgaagaggcagagacaagtcttgcagagtacgcagagccccaggacaaagaatgccccatcactgccctccagaacatgctacaaaactgctccagggaaaatagagaaagtcaaacctcctccatcccccaccactgaaggccccagcttgcagcctgacttagcccctgaagaggctgccggaacccagcggcccaagaatctgatgcagaccctcatggaagactatgagacacacaaatctaaaaggcgcgagagaatggatgatagtagtgtcctcgaggccacacgggttaatcgaagaaagagcgcactggctttgcgctgggaagcagggatctatgccaaccaggaggaagaagacaacgaataaacttccttcaacccaggaagcgtctttggtgcttgggagaccaagaaaccaagaaattaacaactgaaagcattttaatggactatttattaaagtgcaaacaaactcagcaatccttatgtagaccagaagctgcaatatacaatgatgaaaatgaaacgaaaaggaagtccccccatcagactctggacacccaggaatcaaaagagaaaggacttttttggtgactcaatcccagtgtctggtttggggccaatctacaatggatccaaaaggacaaaacatgttacaagcaaatcaacatagttgctgcaggcggaactgagaccagcctctctgggcgatgaaggacaatggtggtagggccacttagagagcagtagggcccaggctggtgcagcctacatggcacaggatatttccctgcaccagtttcccacctgtcacttgcagcatcagagggtgttgcattaactccattttctccagcagccataaaatgaatggcgtttctctccatatttgcccagaagaggcagttatgattccacttctcctacatttaattatttttaattgagaacaactcatgatcacaattcataaaatccatattttaagacaatagttcttcatgtcacaaacacaatctattctacatgaggaggctgagaaaggggaagagaaaaacaaaccaaatggatgatgttagctttaggatcgtgtctgcttataatattcactgatctgcagtttatgagaacacattttcacagttatgtttcttcataggaaaactatatttagtgggcaacaactatttttatgatgggatgggggagtatatacacgtatagaatctgtacgcgttgaacaacttggttcaagatggtgggggcatttttagagcggcaataattgaaaaaaaaggcgaactctgccttggagaggtagatgataagaaataaaaaggtgtttataactattttgtattataaagtgggccttagagataggaagaagaatgatggattccttttggatcaatcagaaaggaaacacgaaagaaaagtcaggaaggtagagagagaaaaagggagggaaggagaaagaatgggaataaaataaggaggtaagagatactatttttgctgagcaaccagtgtgtttcaggatgatacaaagaaaaatatagaatagaaataagtgcaggcttggaatcagctacaaatcctaaagatggggtgtgtgtggatgtgtgtgtgtgtgtgtgtacaccattgtgtgtttgtaaaatgtgtatgttcatgagtaagggtgtgtgtgtgtgtgtattaaaattccagagtgaccgtggcacttgggtgtacaggtaattcctccagagctgtttgctggcttcaggagtggagtgagaatttcttttttatgaaaagggatataaaggcaccgagctgatgcagtatttgtaatattaagttgacctaacaaggtatttgcatgagtcacaattacaaagttttgagcggttttgtaatttgacatttaggagagtctcctatttattctcatactttacattcatgcttagtatactatagaggatgccagctttaatctttctgtcatttaaagcaatatgataagggtattcaataattgggtgccctaaatttctggatgagaaaattttcaattctggccatgagaaagaaaaaaaaataaacagccttctttttttttcctttgttttaaaactgtggttttttaaaaaagcaataattaactcagacctcactaaaaatcatttttgtttttatattgttatgtcataagctctattatgttattctaacaagtagcaatttcacaaaatttgtatgtagatgttaacgcacatttcctttgcttcttttattagactagtgttgactttggggggggacatttattcacaaatgagaagtaggcacaaagtaaaaaatggaaccatctactaacaaggatcctttaaaactgccaagggagctctaacttgaagccacatcctacagatggcagcccaaatagcacatgggcaattggcaccatctttatatggttgagtctcctgaatattttgaatgaattctcaacaaaatgtgctagccactggggacgcaaaacaagtaagatccctgttgcaagaaattcattttatagtgagggaggttggcatggagactaaaattctcaggaaaatgagatccgtgttagattagaagtcctgatgtgaaatgggaggactcaggaaggaggatcgtctttacctgaggatttctagccagaggtcccagatgcctgggctgagaacccagcgataagggggcgttcccaaagcagacacagggataagaacagaggaggcagcagcattgcacagccccaggcacagtggcagttaggatggctggagagtaggatagttctatgggttgcccaaaaaatgtgatgcgcttcatgttttctctgactcatggatctggtagagaccatagacatgatatagactaacttccccatttttcacaagaggaaaccatccttatgacttaccttaaagttttttgttctgttttgaaggaaaccatgtgcttcatgaaacctacagttgacaagagaatgtacagctaagagaaaagcttaagaggccacactattcgcggaatggctttagaggcagatgaagtggtctttgaccacagttgattgaaccagagcacttattgcttaaagaataacagagttctagagctgggggttcttgggccatgctccgtgtgtggataaggaaagaaatactgtttctgggactctcccacagtcacaaagctgttttcactgtggcccctacatctcttaacttttgctattactcctatgctgccttccggattactgctgtctatcttcttgctccactcactgaagatcctattataatcccatgaaaatgtaaattacagtttacttgggagagccagattttctctgtgctcttgagttttttattcattcaagaaaccttgggccaccgctttgtacatagcaccgtgctaggctctgggatcccaaatggacccttttaactttctgaagatgggaccgtcccctggaggaaagtcattcctgcctaatccatcgagagaaagaggcttacgaaaaactttgcctctgatgctcagccccacccccaaatagcacacaagcttgttaaccccacctcttacaaaatgtttagattctgtaggtgttaaaagcctttctggaagtattgcattctgccgtgtttataggtgttcactttcctccagagctgattaactactgacatgacttggctttctcatccagaaattatggaaacagggtctgtcagtggcaggaggccgtgctgtgttttacttggatgacacaatgcagtttacttgcctcttcatacccatgcatgctgctcaccctagacaatgacatataagccgtatatagatcaatgtccacatatatatacacacacacatatatatatataaagtgtaacaaggaacactaaaacagtgttgattcttgtctctgaagacaaataattaaaccttttttttcccaactaaagaatggatttaattaaactatgtattgaaaaaaaagtagcctaagtgttagagatggtgaatatattccattttagttaaagaacaaatttcctgaattttaagcattcagtgagctgccaattttgattttgtgttgctctttacccaaattattttttctttgtttttctttttttgggggaggaggggaaaaaagcagcaatactgtgtttggaaattatactctgtatctggttttcctgtgtatgttaaccacttaaatgttattatcctgctttggttttagagtgattgtgaggcattcaatgcaagtatacagttattttctcattaaaatccaatgtgtgttgagtttttataaa

SEQ ID NO: 22 - DNA, 1301 bp, Homo sapiens
gccgcccgctccgagcctggtgcttccgaccgctgcgcgcggctcctgggctgtcacagtctcccgttgccgccgtcatgtcccggcagctgtcgcgggcccggccagccacggtgctgggcgccatggagatggggcgccgcatggacgcgcccaccagcgccgcagtcacgcgcgccttcctggagcgcggccacaccgagatagacacggccttcgtgtacagcgagggccagtccgagaccatccttggcggcctggggctccggctgggcggcagcgactgcagagtgaaaattgataccaaggccattccactgtttgggaactccctgaagcctgacagtctccggttccagctggagacgtcactgaagcggctgcagtgtccccgagtggacctcttctacctgcatatgccagaccacagcaccccggtggaagagacactgcgtgcctgccaccagctgcaccaggagggcaagttcgtggagcttggcctctccaactatgcagcctgggaagtggccgagatctgtaccctctgcaagagcaacggctggatcctgcccactgtgtaccagggcatgtacaatgccatcacccggcaggtggaaacggagctcttcccctgcctcaggcactttggactgaggttctatgccttcaaccctctggctgggggcctgctgaccggcaagtacaagtatgaggacaagaatgggaaacagcccgtgggccgcttctttgggaatacctgggcagagatgtacaggaatcgctactggaaggagcaccactttgagggcattgccctggtggagaaggccctgcaggccgcgtatggcgccagcgcccccagcatgacctcggccaccctccggtggatgtaccaccactcacagctgcagggtgcccacggggacgcggtcatcctgggcatgtccagcctggagcagctggagcagaacttggcagcggcagaggaagggcccctggagccggctgtcgtggacgcctttaatcaagcctggcatttggttactcacgaatgtcccaactacttccgctaggcccatcgtttctcaggctgcccaaggctcttctgtaacatcttttgttactcacattttctttaatttagaactgcctcagtaaattcttagggatggaagtatttggacaaaaacctaatagaagagtcaccaccaaatgaagaataaaactcccagggtgctgtgaaaaaaaaaaaaaaaaaaaaaaaaaaaaaaaaaaaaaaaaaaaaaaaaaaaaaaaaaaaa

SEQ ID NO: 23 - DNA, 3148 bp, Homo sapiens
aggaaggaaccagctgtaagggagggcagagggggatgtcttggaggggaatcccagactttggacactggtctctcttggaccaagaccccctctctggcttggcctccagatctgcccacctttctgtctccgtctttccaggattccatatgcttctgtctgtcttctcgtcgcagggtagattctctgtccctttctctgctgctcttcctcctggagccgtggaggcagctgggcgtgggtgccttccccgtggaaagccgctggcagggagtctacagccccttccgggactttgtgtgtgctggctgccccagggacctgcaggaggccctgctgggcttcgacgtgcagagctccagggagctgcgtaggtctcaggattacctgtcctgcgagaggacccaccctgaggacagtgtgggcagtatggaagacatcctggaggagctgctgcagcaccgggagcccaaggccctgcagctgtacctcaggaaggctctgagcaactcactgcaccccctgggaaagctgctccggacactgatgctgaccttccaggctacctacgcaggtgtcggggccaacaagcacctgcaggagctggcccaggaggaggtgaagcagcatgcccaggaactctgggctgcctacaggggtctgctgcgagttgccttagagcgcaagggccaggccctggaggaggatgaagacacagagacaagggacctccaggtgcatggattggtgctgcccctcatgctgcccagcttctactcagagctcttcacgctctacctgctgcttcatgagcgggaggacagcttctacagccagggcattgccaacttgagcctctttcctgatacccaactgctcgagttcctggatgtgcagaagcacttgtggcccctcaaggacctcacgctgacgagcaatcagaggtactccctggtcagggacaagtgtttcctgtcagccaccgagtgcctgcagaagatcatgaccacggtggacccacgggagaagctggaggtgctggagaggacatacggggaaattgagggcacggtgtcgagggtattgggccgggagtacaagctgcccatggacgacctgctgccacttctcatctacgtggtgtcgcgcgcccgaattcagcacctgggagccgagatccacctgatccgtgacatgatggaccccaaccacacaggaggcctgtatgacttcctgctcacagccctggagtcctgttacgagcacatccagaaagaagacatgaggctgcaccgcttacctggccactggcactccagggagctctggtagcctggcctttcctggacagactgaagagctgagcagggcactgccagcctgtccctcattacccaaggcaaggggcaggacaggccctcagaagcagctcttggaggagatgagcattttgttttgcacaggaagatgctgctgctgccctgactgggatgagggtgaggggtgacgggtgtggccctggatgtggtggttttcccttggccactagcccatcttcaatgaccccttaatctgcagcagctcacaggctgggggtgaggagtccctggcttctcttagcctgagcctttctcccaagttccagagcctctccgggcctcagtgctgccatctgtacaatggtggagtgagtacgctgtaaaggaccttccattcattttgctgaattccagagtccttttggaaaactgactttagtctgctgggctgtattgacctctggcaggctcgaagcctcactgggtatgcagtcaacaggatgggcctggagatccgtgaactgcaggccacgtacccatgacgtaaacggcggcactggagcaagctggggcggggggtgggtaaaccctcactgccagcaggccccaagtggcttgtaaatcattctcctgtgatgtctgtgggcctgcgtggggacaacaggggcacatgacatctgcctgggccctgaccaataaaccctcagacccaggacccaggaccctgctgtagttggggagcaggagtacctttgggaggggaggactttatttaaacagtggttctagtgtgggaccaagagaggcaggagctgggtcttggggcagctttattcctgttgggcctcagtttctcttccccacacagtttatcttccgtcacattgtgccgggtgacgtgcacggtctccctctgccctagccggagatgcatgatgacaggcagtgtgatgtgttctgaaagtgtccagggcaaagcgtagggagagggtggatttgtgcagggtgcagctctggagaagaagctggatcactcttggtcccattccctaggccctgagcaagtcaggctcctggctctgggtgtggctcccccaaacgaagtactgacttcagcctgtgaggggagggttgagggaggctctggaaagcccagccacacctgagtccctggcagtagccttggggcagagggcacccgcagagtcccagagatgatgtgggcagtgggcagagagagccttggcgcctctgtttgccaccacttccccaggaaggagggacagcatttctctggctggttccactaaatgtgccagcccaaatgcagggcatgggctctggttctgccaggagcctgtgacacccccaggaagggggtggaactgaggaagagcgaggatatgcaggcactcatgcttaccgggactggggcagctcactaggattctatcctttccaatcggcatcagccagctcttgtcccctgataagtgaggacagcctgaccctggcctcaaatgcagccatccctgagttcatgcgatgctgacgggaccccagcacacttccctgcctcctttgagatctgcgagcccttgctgcagttcagattcaacaaggccctctgcccaccctctcactaggcctcacccaacaccagtggaactggagcctctggctgggcacagtggctcactttgggaggctgaggcaggaaggctgctggaaactgagagttcaagaccagcctgggcaacatagtgagaccctgtctctacaaatacaaaataaaataattagctgggaaaaaaaaaaaaaaaaaa

SEQ ID NO: 24 - DNA, 4739 bp, Homo sapiens
gcacaggcagtcccggcgcggggcaaccacagcgctcaggaggccctgagtccggcacctggccatgtgcaaccctgaggaggcagctctgctgcggctggaggaggtcttctcagccaccctcgcccatgtcaacagccttgtcctccagcccctgctcccagccgccccagatccctcggatccctggggcagagagtgcctgcggctcttgcaacagctgcacaagagctcccagcaactctgggaggtgacggaggaaagcctgcactcactgcaggagaggctgcgttacccggactccaccggtctggagtccctgctgctgctgcgaggtgctgaccgtgtactgcaggcccacatagagtacattgagtcctacacaagctgcatggtggtgcaggccttccagaaggcagcaaagaggagaagcgagtactggcggggccagcggaaggcgctgcggcagctgctttcaggtgtgagctcagagggctcggtgggcgcatcgctgggccaggccctccaccagccactcgcccatcacgtgcaacagtacgtgctcctcctgctgagcctcggggacaccattggggagcatcacccaacccgggagctggtggtgaacgcagtcaccctctttgggaacctgcagtccttcatgaagcaggagttggaccaggctgtggccacacaggctctctggcacaccctgagaggccggctgagggatgtgctctgcacccctgctcacagactccttcaggacagccaggacgtacccgtgacggtcgcaccgttgcgggctgagcgtgtgctgctctttgatgatgccctcgtcctgctgcagggccacaatgtccacacctttgatctgaagctggtgtgggtggatcctgggcaggacgggtgcacgtttcacctcctcacgcccgaagaagagttctccttttgtgccaaggactcccagggccaggcagtctggcagtggaaggtgacctgggctgttcaccaggccctgcatgggaagaaggacttccccgtgctgggggctggcctggagccctcccagcctcccgactgccgctgcgcagaatataccttccaggcagagggccggctctgccaggccacctacgagggcgagtggtgcaggggccggccccacggcaagggaaccctgaaatggccggatgggcggaatcacgtggggaatttctgccagggcctggagcatggcttcggcatccgcctgctgccccaggcctctgaggacaagttcgactgttacaagtgtcactggcgagaaggcagcatgtgtggctacggcatctgtgagtacagcaccgacgaggtgtacaagggctacttccaggagggcctgcggcacggatttggggtccttgagagtggtccgcaggccccccagcccttcaggtacacgggccactgggagaggggccagaggagcggctatggcattgaggaggatggtgacagaggtgagcgctacattggcatgtggcaggctggtcagcgccacggcccaggggtcatggtcacccaggcaggtgtctgctaccagggcaccttccaggcggacaagacggtgggcccgggcatcctcctctctgaagacgactccctgtatgagggcaccttcaccagggacctgaccctcatggggaagggcaaggtcaccttccccaatggcttcaccctggagggctcgttcggcagtggggcagggagaggactgcacacacagggtgtgctggacacggctgccctcccaccagacccgagcagtacctgcaagaggcagctgggcgtgggtgccttccccgtggaaagccgctggcagggagtctacagccccttccgggactttgtgtgtgctggctgccccagggacctgcaggaggccctgctgggcttcgacgtgcagagctccagggagctgcgtaggtctcaggattacctgtcctgcgagaggacccaccctgaggacagtgtgggcagtatggaagacatcctggaggagctgctgcagcaccgggagcccaaggccctgcagctgtacctcaggaaggctctgagcaactcactgcaccccctgggaaagctgctccggacactgatgctgaccttccaggctacctacgcaggtgtcggggccaacaagcacctgcaggagctggcccaggaggaggtgaagcagcatgcccaggaactctgggctgcctacaggggtctgctgcgagttgccttagagcgcaagggccaggccctggaggaggatgaagacacagagacaagggacctccaggtgcatggattggtgctgcccctcatgctgcccagcttctactcagagctcttcacgctctacctgctgcttcatgagcgggaggacagcttctacagccagggcattgccaacttgagcctctttcctgatacccaactgctcgagttcctggatgtgcagaagcacttgtggcccctcaaggacctcacgctgacgagcaatcagaggtactccctggtcagggacaagtgtttcctgtcagccaccgagtgcctgcagaagatcatgaccacggtggacccacgggagaagctggaggtgctggagaggacatacggggaaattgagggcacggtgtcgagggtattgggccgggagtacaagctgcccatggacgacctgctgccacttctcatctacgtggtgtcgcgcgcccgaattcagcacctgggagccgagatccacctgatccgtgacatgatggaccccaaccacacaggaggcctgtatgacttcctgctcacagccctggagtcctgttacgagcacatccagaaagaagacatgaggctgcaccgcttacctggccactggcactccagggagctctggtagcctggcctttcctggacagactgaagagctgagcagggcactgccagcctgtccctcattacccaaggcaaggggcaggacaggccctcagaagcagctcttggaggagatgagcattttgttttgcacaggaagatgctgctgctgccctgactgggatgagggtgaggggtgacgggtgtggccctggatgtggtggttttcccttggccactagcccatcttcaatgaccccttaatctgcagcagctcacaggctgggggtgaggagtccctggcttctcttagcctgagcctttctcccaagttccagagcctctccgggcctcagtgctgccatctgtacaatggtggagtgagtacgctgtaaaggaccttccattcattttgctgaattccagagtccttttggaaaactgactttagtctgctgggctgtattgacctctggcaggctcgaagcctcactgggtatgcagtcaacaggatgggcctggagatccgtgaactgcaggccacgtacccatgacgtaaacggcggcactggagcaagctggggcggggggtgggtaaaccctcactgccagcaggccccaagtggcttgtaaatcattctcctgtgatgtctgtgggcctgcgtggggacaacaggggcacatgacatctgcctgggccctgaccaataaaccctcagacccaggacccaggaccctgctgtagttggggagcaggagtacctttgggaggggaggactttatttaaacagtggttctagtgtgggaccaagagaggcaggagctgggtcttggggcagctttattcctgttgggcctcagtttctcttccccacacagtttatcttccgtcacattgtgccgggtgacgtgcacggtctccctctgccctagccggagatgcatgatgacaggcagtgtgatgtgttctgaaagtgtccagggcaaagcgtagggagagggtggatttgtgcagggtgcagctctggagaagaagctggatcactcttggtcccattccctaggccctgagcaagtcaggctcctggctctgggtgtggctcccccaaacgaagtactgacttcagcctgtgaggggagggttgagggaggctctggaaagcccagccacacctgagtccctggcagtagccttggggcagagggcacccgcagagtcccagagatgatgtgggcagtgggcagagagagccttggcgcctctgtttgccaccacttccccaggaaggagggacagcatttctctggctggttccactaaatgtgccagcccaaatgcagggcatgggctctggttctgccaggagcctgtgacacccccaggaagggggtggaactgaggaagagcgaggatatgcaggcactcatgcttaccgggactggggcagctcactaggattctatcctttccaatcggcatcagccagctcttgtcccctgataagtgaggacagcctgaccctggcctcaaatgcagccatccctgagttcatgcgatgctgacgggaccccagcacacttccctgcctcctttgagatctgcgagcccttgctgcagttcagattcaacaaggccctctgcccaccctctcactaggcctcacccaacaccagtggaactggagcctctggctgggcacagtggctcactttgggaggctgaggcaggaaggctgctggaaactgagagttcaagaccagcctgggcaacatagtgagaccctgtctctacaaatacaaaataaaataattagctgggaaaaaaaaaaaaaaaaaa

SEQ ID NO: 25 - DNA, 2195 bp, Homo sapiens
atcacttggctcttctctgatatgaactgggcagcatctaaatgtatctttcttgattttgttgtctctttgcatagagcatatcttgtgaaaacagaaatatccatgtaatggttttttcttgtagtgaccgctcgaaattgcttgagcaacatagagataatgggcaggggtccctgtgtgaagcacctagaggctggaaagctgatggcaaagctggaggggtgaggcagggagaggataaacacagtggaaatgcaggaggaaagctgtgctctgtggtggcctaattacaaggacctgccctacagccagaatcagccagcaaatgcttttgtaaaggaactaaaagaaagggaaaagaggaagtaaacaaaaggtcccttttcagagagggaaccagtgggagatttaagagcaaggaacaacccatttcgtcgttatggtaagtggagattattccttgggcctgaatgacttgaatgtttccccgcctgagctaacagtccatgtgggtgattcagctctgatgggatgtgttttccagagcacagaagacaaatgtatattcaagatagactggactctgtcaccaggagagcacgccaaggacgaatatgtgctatactattactccaatctcagtgtgcctattgggcgcttccagaaccgcgtacacttgatgggggacatcttatgcaatgatggctctctcctgctccaagatgtgcaagaggctgaccagggaacctatatctgtgaaatccgcctcaaaggggagagccaggtgttcaagaaggcggtggtactgcatgtgcttccagaggagcccaaagagctcatggtccatgtgggtggattgattcagatgggatgtgttttccagagcacagaagtgaaacacgtgaccaaggtagaatggatattttcaggacggcgcgcaaaggaggagattgtatttcgttactaccacaaactcaggatgtctgtggagtactcccagagctggggccacttccagaatcgtgtgaacctggtgggggacattttccgcaatgacggttccatcatgcttcaaggagtgagggagtcagatggaggaaactacacctgcagtatccacctagggaacctggtgttcaagaaaaccattgtgctgcatgtcagcccggaagagcctcgaacactggtgaccccggcagccctgaggcctctggtcttgggtggtaatcagttggtgatcattgtgggaattgtctgtgccacaatcctgctgctccctgttctgatattgatcgtgaagaagacctgtggaaataagagttcagtgaattctacagtcttggtgaagaacacgaagaagactaatccagagataaaagaaaaaccctgccattttgaaagatgtgaaggggagaaacacatttactccccaataattgtacgggaggtgatcgaggaagaagaaccaagtgaaaaatcagaggccacctacatgaccatgcacccagtttggccttctctgaggtcagatcggaacaactcacttgaaaaaaagtcaggtgggggaatgccaaaaacacagcaagccttttgagaagaatggagagtcccttcatctcagcagcggtggagactctctcctgtgtgtgtcctgggccactctaccagtgatttcagactcccgctctcccagctgtcctcctgtctcattgtttggtcaatacactgaagatggagaatttggagcctggcagagagactggacagctctggaggaacaggcctgctgaggggaggggagcatggacttggcctctggagtgggacactggccctgggaaccaggctgagctgagtggcctcaaaccccccgttggatcagaccctcctgtgggcagggttcttagtggatgagttactgggaagaatcagagataaaaaccaacccaaatcattcctctggcacattatttctaaataagtgttgtttgtggaaatcgtcctatttttatgcctcggttgagggggcaagtaaagtcctggtgaggaatttacagttagaaacttttggaaaaactgaagttcctggaggaaagccaaaccgtgctaacacactagaggctggttttggtcctgggaaaggtttggggtgaatgggttggaagtagggtatgaatacagttttgggattt

SEQ ID NO: 26 - DNA, 3740 bp, Homo sapiens
gggacggcggcggcgcagctcggaacccgccagggtccagggtccaggttccagcgcccggcggcccaggcaccccccgagcccagctccacacaccgttcctggatctcctctccccaggcggagcgtgcccctgcccagtccagtgaccttcgcctgttggagccctggttaatttttgcccagtctgcctgttgtggggctcctcccctttggggatataagcccggcctggggctgctccgttctctgcctggcctgaggctccctgagccgcctccccaccatcaccatggccaagggcttctatatttccaagtccctgggcatcctggggatcctcctgggcgtggcagccgtgtgcacaatcatcgcactgtcagtggtgtactcccaggagaagaacaagaacgccaacagctcccccgtggcctccaccaccccgtccgcctcagccaccaccaaccccgcctcggccaccaccttggaccaaagtaaagcgtggaatcgttaccgcctccccaacacgctgaaacccgattcctaccgggtgacgctgagaccgtacctcacccccaatgacaggggcctgtacgtttttaagggctccagcaccgtccgtttcacctgcaaggaggccactgacgtcatcatcatccacagcaagaagctcaactacaccctcagccaggggcacagggtggtcctgcgtggtgtgggaggctcccagccccccgacattgacaagactgagctggtggagcccaccgagtacctggtggtgcacctcaagggctccctggtgaaggacagccagtatgagatggacagcgagttcgagggggagttggcagatgacctggcgggcttctaccgcagcgagtacatggagggcaatgtcagaaaggtggtggccactacacagatgcaggctgcagatgcccggaagtccttcccatgcttcgatgagccggccatgaaggccgagttcaacatcacgcttatccaccccaaggacctgacagccctgtccaacatgcttcccaaaggtcccagcaccccacttccagaagaccccaactggaatgtcactgagttccacaccacgcccaagatgtccacgtacttgctggccttcattgtcagtgagttcgactacgtggagaagcaggcatccaatggtgtcttgatccggatctgggcccggcccagtgccattgcggcgggccacggcgattatgccctgaacgtgacgggccccatccttaacttctttgctggtcattatgacacaccctacccactcccaaaatcagaccagattggcctgccagacttcaacgccggcgccatggagaactggggactggtgacctaccgggagaactccctgctgttcgaccccctgtcctcctccagcagcaacaaggagcgggtggtcactgtgattgctcatgagctggcccaccagtggttcgggaacctggtgaccatagagtggtggaatgacctgtggctgaacgagggcttcgcctcctacgtggagtacctgggtgctgactatgcggagcccacctggaacttgaaagacctcatggtgctgaatgatgtgtaccgcgtgatggcagtggatgcactggcctcctcccacccgctgtccacacccgcctcggagatcaacacgccggcccagatcagtgagctgtttgacgccatctcctacagcaagggcgcctcagtcctcaggatgctctccagcttcctgtccgaggacgtattcaagcagggcctggcgtcctacctccacacctttgcctaccagaacaccatctacctgaacctgtgggaccacctgcaggaggctgtgaacaaccggtccatccaactccccaccaccgtgcgggacatcatgaaccgctggaccctgcagatgggcttcccggtcatcacggtggataccagcacggggaccctttcccaggagcacttcctccttgaccccgattccaatgttacccgcccctcagaattcaactacgtgtggattgtgcccatcacatccatcagagatggcagacagcagcaggactactggctgatagatgtaagagcccagaacgatctcttcagcacatcaggcaatgagtgggtcctgctgaacctcaatgtgacgggctattaccgggtgaactacgacgaagagaactggaggaagattcagactcagctgcagagagaccactcggccatccctgtcatcaatcgggcacagatcattaatgacgccttcaacctggccagtgcccataaggtccctgtcactctggcgctgaacaacaccctcttcctgattgaagagagacagtacatgccctgggaggccgccctgagcagcctgagctacttcaagctcatgtttgaccgctccgaggtctatggccccatgaagaactacctgaagaagcaggtcacacccctcttcattcacttcagaaataataccaacaactggagggagatcccagaaaacctgatggaccagtacagcgaggttaatgccatcagcaccgcctgctccaacggagttccagagtgtgaggagatggtctctggccttttcaagcagtggatggagaaccccaataataacccgatccaccccaacctgcggtccaccgtctactgcaacgctatcgcccagggcggggaggaggagtgggacttcgcctgggagcagttccgaaatgccacactggtcaatgaggctgacaagctccgggcagccctggcctgcagcaaagagttgtggatcctgaacaggtacctgagctacaccctgaacccggacttaatccggaagcaggacgccacctctaccatcatcagcattaccaacaacgtcattgggcaaggtctggtctgggactttgtccagagcaactggaagaagctttttaacgattatggtggtggctcgttctccttctccaacctcatccaggcagtgacacgacgattctccaccgagtatgagctgcagcagctggagcagttcaagaaggacaacgaggaaacaggcttcggctcaggcacccgggccctggagcaagccctggagaagacgaaagccaacatcaagtgggtgaaggagaacaaggaggtggtgctccagtggttcacagaaaacagcaaatagtccccagcccttgaagtcacccggcccccatgcaaggtgcccacatgtgtccatcccagcggctggtgcagggcctccattcctggagcccgaggcaccagtgtcctcccctcaaggacaaagtctccagcccacgttctctctgcctgtgagccagtctagttcctgatgacccaggctgcctgagcacctcccagcccctgcccctcatgccaaccccgccctaggcctggcatggcacctgtcgcccagtgccctggggctgatctcagggaagcccagctccagggccagatgagcagaagctctcgatggacaatgaacggccttgctgggggccgccctgtaccctctttcacctttccctaaagaccctaaatctgaggaatcaacagggcagcagatctgtatatttttttctaagagaaaatgtaaataaaggatttctagatgaaaaaaaaaaaaaaaaaaaaaaaaaaaaaaaaaaaaaaaaaaaaaaaaaaaaaaaaaaaaaaaaaaaaaaaaaaaaaaaaaaaaaaaaaaa

SEQ ID NO: 27 - DNA, 5540 bp, Homo sapiens
aattgcttccggggagttgcgagggagcgagggggaataaaggacccgcgaggaagggcccgcggatggcgcgtccctgagggtcgtggcgagttcgcggagcgtgggaaggagcggaccctgctctccccgggctgcgggccatggccacggcggagcggagagccctcggcatcggcttccagtggctctctttggccactctggtgctcatctgcgccgggcaagggggacgcagggaggatgggggtccagcctgctacggcggatttgacctgtacttcattttggacaaatcaggaagtgtgctgcaccactggaatgaaatctattactttgtggaacagttggctcacaaattcatcagcccacagttgagaatgtcctttattgttttctccacccgaggaacaaccttaatgaaactgacagaagacagagaacaaatccgtcaaggcctagaagaactccagaaagttctgccaggaggagacacttacatgcatgaaggatttgaaagggccagtgagcagatttattatgaaaacagacaagggtacaggacagccagcgtcatcattgctttgactgatggagaactccatgaagatctctttttctattcagagagggaggctaataggtctcgagatcttggtgcaattgtttactgtgttggtgtgaaagatttcaatgagacacagctggcccggattgcggacagtaaggatcatgtgtttcccgtgaatgacggctttcaggctctgcaaggcatcatccactcaattttgaagaagtcctgcatcgaaattctagcagctgaaccatccaccatatgtgcaggagagtcatttcaagttgtcgtgagaggaaacggcttccgacatgcccgcaacgtggacagggtcctctgcagcttcaagatcaatgactcggtcacactcaatgagaagcccttttctgtggaagatacttatttactgtgtccagcgcctatcttaaaagaagttggcatgaaagctgcactccaggtcagcatgaacgatggcctctcttttatctccagttctgtcatcatcaccaccacacactgttctgacggttccatcctggccatcgccctgctgatcctgttcctgctcctagccctggctctcctctggtggttctggcccctctgctgcactgtgattatcaaggaggtccctccaccccctgccgaggagagtgaggaagaagatgatgatggtctgcctaagaaaaagtggccaacggtagacgcctcttattatggtgggagaggcgttggaggcattaaaagaatggaggttcgttggggagaaaagggctccacagaagaaggtgctaagttggaaaaggcaaagaatgcaagagtcaagatgccggagcaggaatatgaattccctgagccgcgaaatctcaacaacaatatgcgtcggccttcttccccccggaagtggtactctccaatcaagggaaaactcgatgccttgtgggtcctactgaggaaaggatatgatcgtgtgtctgtgatgcgtccacagccaggagacacggggcgctgcatcaacttcaccagggtcaagaacaaccagccagccaagtacccactcaacaacgcctaccacacctcctcgccgcctcctgcccccatctacactcccccacctcctgcgccccactgccctcccccgccccccagcgcccctacccctcccatcccgtccccaccttccacccttccccctcctccccaggctccacctcccaacagggcacctcctccctcccgccctcctccaaggccttctgtctagagcccaaagttcctgctctgggctctctcagaaacttcaggagatgttagaacaagtctttccagttagagaagaggagtggtgataaagcccactgaccttcacacattctaaaaattggttggcaatgccagtataccaacaatcatgatcagctgaaagaaacagatattttaaattgccagaaaacaaatgatgaggcaactacagtcagatttatagccagccatctatcacctctagaaggttccagagacagtgaaactgcaagatgctctcaacaggattatgtctcatggagaccagtaagaaaatcatttatctgaaggtgaaatgcagagttggataagaaatacattgctgggtttctaaaatgctgccttcctgcctctactccacctccatccctggactttggacccttggcctaggagcctaaggaccttcacccctgtgcaccacccaagaaagaggaaaactttgcctacaactttggaaatgctggggtccctggtgtggtaagaaactcaacatcagacgggtatgcagaaggatgttcttctgggatttgcaggtacataaaaaatgtatggcatcttttccttgcaaattcttccagtttccaagtgagaaggggagcaggtgtttactgatggaaaaggtatgttgctatgttgatgtgtaagtgaaatcagttgtgtgcaatagacaggggcgtattcatgggagcatcagccagtttctaaaacccacaggccatcagcagctagaggtggctggctttggccagacatggaccctaaatcaacagacaatggcattgtcgaagagcaacctgttaatgaatcatgttaaaaatcaaggtttggcttcagtttaaatcacttgaggtatgaagtttatcctgttttccagagataaacataagttgatcttcccaaaataccatcattaggacctatcacacaatatcactagttttttttgtttgtttgttttttgttttttttcttggtaaagccatgcaccacagacttctgggcagagctgagagacaatggtcctgacataataaggatctttgattaacccccataaggcatgtgtgtgtatacaaatatacttctctttggcttttcgacatagaacctcagctgttaaccaaggggaaatacatcagatctgcaacacagaaatgctctgcctgaaatttccaccatgcctaggactcaccccatttatccaggtctttctggatctgtttaatcaataagccctataatcacttgctaaacactgggcttcatcacccagggataaaaacagagatcattgtcttggacctcctgcatcagcctattcaaaattatctctctctctagctttccacaaatcctaaaattcctgtcccaagccacccaaattctcagatcttttctggaacaaggcagaatataaaataaatatacatttagtggcttgggctatggtctccaaagatccttcaaaaatacatcaagccagcttcattcactcactttacttagaacagagatataagggcctgggatgcatttattttatcaataccaatttttgtggccatggcagacattgctaatcaatcacagcactatttcctattaagcccactgatttcttcacaatccttctcaaattacaattccaaagagccgccactcaacagtcagatgaacccaacagtcagatgagagaaatgaaccctacttgctatctctatcttagaaagcaaaaacaaacaggagtttccagggagaatgggaaagccagggggcataaaaggtacagtcaggggaaaatagatctaggcagagtgccttagtcagggaccacgggcgctgaatctgcagtgccaacaccaaactgacacatctccaggtgtacctccaaccctagccttctcccacagctgcctacaacagagtctcccagccttctcagagagctaaaaccagaaatttccagactcatgaaagcaaccccccagcctctccccaaccctgccgcattgtctaatttttagaacactaggcttcttctttcatgtagttcctcataagcaggggccagaatatctcagccacctgcagtgacattgctggacccctgaaaaccattccataggagaatgggttccccaggctcacagtgtagagacattgagcccatcacaactgttttgactgctggcagtctaaaacagtccacccaccccatggcactgccgcgtgattcccgcggccattcagaagttcaagccgagatgctgacgttgctgagcaacgagatggtgagcatcagtgcaaatgcaccattcagcacatcagtcatatgcccagtgcagttacaagatgttgtttcggcaaagcattttgatggaatagggaactgcaaatgtatgatgattttgaaaaggctcagcaggatttgttcttaaaccgactcagtgtgtcatccccggttatttagaattacagttaagaaggagaaacttctataagactgtatgaacaaggtgatatcttcatagtgggctattacaggcaggaaaatgttttaactggtttacaaaatccatcaatacttgtgtcattccctgtaaaaggcaggagacatgtgattatgatcaggaaactgcacaaaattattgttttcagcccccgtgttattgtccttttgaactgttttttttttattaaagccaaatttgtgttgtatatattcgtattccatgtgttagatggaagcatttcctatccagtgtgaataaaaagaacagttgtagtaaattattataaagccgatgatatttcatggcaggttattctaccaagctgtgcttgttggtttttcccatgactgtattgcttttataaatgtacaaatagttactgaaatgacgagacccttgtttgcacagcattaataagaaccttgataagaaccatattctgttgacagccagctcacagtttcttgcctgaagcttggtgcaccctccagtgagacacaagatctctcttttaccaaagttgagaacagagctggtggattaattaatagtcttcgatatctggccatgggtaacctcattgtaactatcatcagaatgggcagagatgatcttgaagtgtcacatacactaaagtccaaacactatgtcagatgggggtaaaatccattaaagaacaggaaaaaataattataagatgataagcaaatgtttcagcccaatgtcaacccagttaaaaaaaaaattaatgctgtgtaaaatggttgaattagtttgcaaactatataaagacatatgcagtaaaaagtctgttaatgcacatcctgtgggaatggagtgttctaaccaattgccttttcttgttatctgagctctcctatattatcatactcagataaccaaattaaaagaattagaatatgatttttaatacacttaacattaaactcttctaactttcttctttctgtgataattcagaagatagttatggatcttcaatgcctctgagtcattgttataaaaaatcagttatcactataccatgctataggagactgggcaaaacctgtacaatgacaaccctggaagttgctttttttaaaaaaataataaatttcttaaatcaaaaaaaaaaaaaaaaaaaa

SEQ ID NO: 28 - DNA, 1399 bp, Homo sapiens
agtgtgaaatcttcagagaagaatttctctttagttctttgcaagaaggtagagataaagacactttttcaaaaatggcaatggtatcagaattcctcaagcaggcctggtttattgaaaatgaagagcaggaatatgttcaaactgtgaagtcatccaaaggtggtcccggatcagcggtgagcccctatcctaccttcaatccatcctcggatgtcgctgccttgcataaggccataatggttaaaggtgtggatgaagcaaccatcattgacattctaactaagcgaaacaatgcacagcgtcaacagatcaaagcagcatatctccaggaaacaggaaagcccctggatgaaacacttaagaaagcccttacaggtcaccttgaggaggttgttttagctctgctaaaaactccagcgcaatttgatgctgatgaacttcgtgctgccatgaagggccttggaactgatgaagatactctaattgagattttggcatcaagaactaacaaagaaatcagagacattaacagggtctacagagaggaactgaagagagatctggccaaagacataacctcagacacatctggagattttcggaacgctttgctttctcttgctaagggtgaccgatctgaggactttggtgtgaatgaagacttggctgattcagatgccagggccttgtatgaagcaggagaaaggagaaaggggacagacgtaaacgtgttcaataccatccttaccaccagaagctatccacaacttcgcagagtgtttcagaaatacaccaagtacagtaagcatgacatgaacaaagttctggacctggagttgaaaggtgacattgagaaatgcctcacagctatcgtgaagtgcgccacaagcaaaccagctttctttgcagagaagcttcatcaagccatgaaaggtgttggaactcgccataaggcattgatcaggattatggtttcccgttctgaaattgacatgaatgatatcaaagcattctatcagaagatgtatggtatctccctttgccaagccatcctggatgaaaccaaaggagattatgagaaaatcctggtggctctttgtggaggaaactaaacattcccttgatggtctcaagctatgatcagaagactttaattatatattttcatcctataagcttaaataggaaagtttcttcaacaggattacagtgtagctacctacatgctgaaaaatatagcctttaaatcatttttatattataactctgtataatagagataagtccattttttaaaaatgttttccccaaaccataaaaccctatacaagttgttctagtaacaatacatgagaaagatgtctatgtagctgaaaataaaatgacgtcacaagac

SEQ ID NO: 29 - DNA, 1634 bp, Homo sapiens
gggtggggaagcttagagaccggtgagggagcagagctggggcgcctgtgtacagggatagagcccggcggcagcagggcgcggcttccctttcccggggcctggggccgcaatcaggtggagtcgagaggccggaggaggggcaggaggaaggggtgcggtcgcgatccggacccggagccagcgcggagcacctgcgcccgcggctgacaccttcgctcgcagtttgttcgcagtttactcgcacaccagtttcccccaccgcgctttggattagtgtgatctcagctcaaggcaaaggtgggatatcatggcatctatctgggttggacaccgaggaacagtaagagattatccagactttagcccatcagtggatgctgaagctattcagaaagcaatcagaggaattggaactgatgagaaaatgctcatcagcattctgactgagaggtcaaatgcacagcggcagctgattgttaaggaatatcaagcagcatatggaaaggagctgaaagatgacttgaagggtgatctctctggccactttgagcatctcatggtggccctagtgactccaccagcagtctttgatgcaaagcagctaaagaaatccatgaagggcgcgggaacaaacgaagatgccttgattgaaatcttaactaccaggacaagcaggcaaatgaaggatatctctcaagcctattatacagtatacaagaagagtcttggagatgacattagttccgaaacatctggtgacttccggaaagctctgttgactttggcagatggcagaagagatgaaagtctgaaagtggatgagcatctggccaaacaagatgcccagattctctataaagctggtgagaacagatggggcacggatgaagacaaattcactgagatcctgtgtttaaggagctttcctcaattaaaactaacatttgatgaatacagaaatatcagccaaaaggacattgtggacagcataaaaggagaattatctgggcattttgaagacttactgttggccatagttaattgtgtgaggaacacgccggcctttttagccgaaagactgcatcgagccttgaagggtattggaactgatgagtttactctgaaccgaataatggtgtccagatcagaaattgaccttttggacattcgaacagagttcaagaagcattatggctattccctatattcagcaattaaatcggatacttctggagactatgaaatcacactcttaaaaatctgtggtggagatgactgaaccaagaagataatctccaaaggtccacgatgggctttcccaacagctccaccttacttcttctcatactatttaagagaacaagcaaatataaacagcaacttgtgttcctaacaggaattttcattgttctataacaacaacaacaaaagcgattattattttagagcatctcatttataatgtagcagctcataaatgaaattgaaaatggtattaaagatctgcaactactatccaacttatatttctgctttcaaagttaagaatctttatagttctactccattaaatataaagcaagataataaaaattgttgcttttgttaaaagtaaaaaaaaaaaaaaaaaa

SEQ ID NO: 30 - DNA, 1630 bp, Homo sapiens
agggccggggtggggcgctggcgtttccgttgcttggatcagtctaggtgcagctgcggatccttcagcgtctgcatctcggcgtcgccccgcgtaccgtcgcccggctctccgccgctctcccgggggttcggggcacttgggtcccacagtctggtcctgcttcaccttcccctgacctgagtagtcgccatggcacaggttctcagaggcactgtgactgacttccctggatttgatgagcgggctgatgcagaaactcttcggaaggctatgaaaggcttgggcacagatgaggagagcatcctgactctgttgacatcccgaagtaatgctcagcgccaggaaatctctgcagcttttaagactctgtttggcagggatcttctggatgacctgaaatcagaactaactggaaaatttgaaaaattaattgtggctctgatgaaaccctctcggctttatgatgcttatgaactgaaacatgccttgaagggagctggaacaaatgaaaaagtactgacagaaattattgcttcaaggacacctgaagaactgagagccatcaaacaagtttatgaagaagaatatggctcaagcctggaagatgacgtggtgggggacacttcagggtactaccagcggatgttggtggttctccttcaggctaacagagaccctgatgctggaattgatgaagctcaagttgaacaagatgctcaggctttatttcaggctggagaacttaaatgggggacagatgaagaaaagtttatcaccatctttggaacacgaagtgtgtctcatttgagaaaggtgtttgacaagtacatgactatatcaggatttcaaattgaggaaaccattgaccgcgagacttctggcaatttagagcaactactccttgctgttgtgaaatctattcgaagtatacctgcctaccttgcagagaccctctattatgctatgaagggagctgggacagatgatcataccctcatcagagtcatggtttccaggagtgagattgatctgtttaacatcaggaaggagtttaggaagaattttgccacctctctttattccatgattaagggagatacatctggggactataagaaagctcttctgctgctctgtggagaagatgactaacgtgtcacggggaagagctccctgctgtgtgcctgcaccaccccactgccttccttcagcacctttagctgcatttgtatgccagtgcttaacacattgccttattcatactagcatgctcatgaccaacacatacacgtcatagaagaaaatagtggtgcttctttctgatctctagtggagatctctttgactgctgtagtactaaagtgtacttaatgttactaagtttaatgcctggccattttccatttatatatattttttaagaggctagagtgcttttagccttttttaaaaactccatttatattacatttgtaaccatgatactttaattagaagcttagccttgaaattgtgaactcttggaaatgttattagtgaagttcgcaactaaactaaacctgtaaaattatgatgattgtattcaaaagattaatgaaaaataaacatttctgtccccctgaattat

SEQ ID NO: 31 - DNA, 2572 bp, Homo sapiens
gaaatatgaagagacgctgcagctgcggtggcggtggcggccactgcagctcagagcggcgcacgcggcggccggggcgggacgcggggccgggcgcggagaagtcggggcgggcggcagagaggccgggacgcggaccgggccggggcgcccacagccgcccgacggcgcccagagagcgcgcgccccgcagccccgcgcctagcccgccgggcatggggcgcgcggcagccgcctgaagccccggcctggcccggccgcacccggccggaggggagggcagagcgcgcgcccagttgcccgggcaccaaatcggagcgcggcgtgcgggagggcccagagcaggactggaaatgtcctggccgcgccgcctcctgctcagatacctgttcccggccctcctgcttcacgggctgggagagggttctgccctccttcatccagacagcaggtctcatcctaggtccttagagaaaagtgcctggagggcttttaaggagtcacagtgccatcacatgctcaaacatctccacaatggtgcaaggatcacagtgcagatgccacctacaatcgagggccactgggtctccacaggctgtgaagtaaggtcaggcccagagttcatcacaaggtcctacagattctaccacaataacaccttcaaggcctaccaattttattatggcagcaaccggtgcacaaatcccacttatactctcatcatccggggcaagatccgcctccgccaggcctcctggatcatccgagggggcacggaagccgactaccagctgcacaacgtccaggtgatctgccacacagaggcggtggccgagaagctcggccagcaggtgaaccgcacatgcccgggcttcctcgcagacgggggtccctgggtgcaggacgtggcctatgacctctggcgagaggagaacggctgtgagtgcaccaaggccgtgaactttgccatgcatgaacttcagctcatccgggtggagaagcagtaccttcaccacaacctcgaccacctggtcgaggagctcttccttggtgacattcacactgatgccacccagaggatgttctaccggccctccagttaccagccccctctgcagaatgccaagaaccacgaccatgcctgcatcgcctgtcggatcatctatcggtcagacgagcaccaccctcccatcctgcccccaaaggcagacctgaccatcggcctgcacggggagtgggtgagccagcgctgtgaggtgcgccccgaagtcctcttcctcacccgccacttcatcttccatgacaacaacaacacctgggagggccactactaccactactcagacccggtgtgcaagcaccccaccttctccatctacgcccggggccgctacagccgcggcgtcctctcgtccagggtcatgggaggcaccgagttcgtgttcaaagtgaatcacatgaaggtcacccccatggatgcggccacagcctcactgctcaacgtcttcaacgggaatgagtgcggggccgagggctcctggcaggtgggcatccagcaggatgtgacccacaccaatggctgcgtggccctgggcatcaaactacctcacacggagtacgagatcttcaaaatggaacaggatgcccgggggcgctatctgctgttcaacggtcagaggcccagcgacgggtccagcccagacaggccagagaagagagccacgtcctaccagatgcccttggtccagtgtgcctcctcttcgccgagggcagaggacctcgcagaagacagtggaagcagcctgtatggccgggcccctgggaggcacacctggtccctgctgctggctgcacttgcctgccttgtccctctgctgcattggaacatccgcagatagaagttttagaaagttctattttttccaaaccaggattccttactattgacagatttgctttaccaaaagaaaagacatttattcttttgatgcacttgaatgccagagaactgtccttctttttctcctctccctccctcccagcccctgagtcatgaacagcaaggagtgtttgaagtttctgctttgaactccgtccagcctgatccctggcctgagcaacttcacaacagtaattgcactttaagacagcctagagttctggacgagcgtgtttggtagcagggatgaaagctagggcctcttatttttttctcttaattattattatatttctgagttaaacttagaagaaacaactatcaagctacaacttttcctgccattttcctgtggttgcagcctgtcttcctttgaaattgttttactctctgagttttatatgctggaatccaatgcagagttggtttgggactgtgatcaagacaccttttattaataaagaagagacacaggtgtagatatgtatatacaaaaagatgtacggtctggccaaaccaccttcccagcctttatgcaaaaaaaggggagaatcaaagctttcatttcagaaatgttgcgtggaaaagtatctgtaattaaagtttcgaagtaatttaaaaaaaaaaaaaaaa

SEQ ID NO: 32 - DNA, 1536 bp, Homo sapiens
acagagcttcaaaaaaagagcgggacagggacaagcgtatctaagaggctgaacatgaatccacagatcagaaatccgatggagcggatgtatcgagacacattctacgacaactttgaaaacgaacccatcctctatggtcggagctacacttggctgtgctatgaagtgaaaataaagaggggccgctcaaatctcctttgggacacaggggtctttcgaggccaggtgtatttcaagcctcagtaccacgcagaaatgtgcttcctctcttggttctgtggcaaccagctgcctgcttacaagtgtttccagatcacctggtttgtatcctggaccccctgcccggactgtgtggcgaagctggccgaattcctgtctgagcaccccaatgtcaccctgaccatctctgccgcccgcctctactactactgggaaagagattaccgaagggcgctctgcaggctgagtcaggcaggagcccgcgtgacgatcatggactatgaagaatttgcatactgctgggaaaactttgtgtacaatgaaggtcagcaattcatgccttggtacaaattcgatgaaaattatgcattcctgcaccgcacgctaaaggagattctcagatacctgatggatccagacacattcactttcaactttaataatgaccctttggtccttcgacggcgccagacctacttgtgctatgaggtggagcgcctggacaatggcacctgggtcctgatggaccagcacatgggctttctatgcaacgaggctaagaatcttctctgtggcttttacggccgccatgcggagctgcgcttcttggacctggttccttctttgcagttggacccggcccagatctacagggtcacttggttcatctcctggagcccctgcttctcctggggctgtgccggggaagtgcgtgcgttccttcaggagaacacacacgtgagactgcgcatcttcgctgcccgcatctatgattacgaccccctatataaggaggcgctgcaaatgctgcgggatgctggggcccaagtctccatcatgacctacgatgagtttgagtactgctgggacacctttgtgtaccgccagggatgtcccttccagccctgggatggactagaggagcacagccaagccctgagtgggaggctgcgggccattctccagaatcagggaaactgaaggatgggcctcagtctctaaggaaggcagagacctgggttgagcagcagaataaaagatcttcttccaagaaatgcaaacagaccgttcaccaccatctccagctgctcacagacaccagcaaagcaatgtgctcctgatcaagtagattttttaaaaatcagagtcaattaattttaattgaaaatttctcttatgttccaagtgtacaagagtaagattatgctcaatattcccagaatagttttcaatgtattaatgaagtgattaattggctccatatttagactaataaaacattaagaatcttccataattgtttccacaaacact

SEQ ID NO: 33 - DNA, 1717 bp, Homo sapiens
ctgccagggggagggccccagagaaaaccagaaagagggtgagagactgaggaagataaagcgtcccagggcctcctacaccagcgcctgagcaggaagcgggaggggccatgactacgaggccctgggaggtcactttagggagggctgtcctaaaaccagaagcttggagcagaaagtgaaaccctggtgctccagacaaagatcttagtcgggactagccggccaaggatgaagcctcacttcagaaacacagtggagcgaatgtatcgagacacattctcctacaacttttataatagacccatcctttctcgtcggaataccgtctggctgtgctacgaagtgaaaacaaagggtccctcaaggccccctttggacgcaaagatctttcgaggccaggtgtattccgaacttaagtaccacccagagatgagattcttccactggttcagcaagtggaggaagctgcatcgtgaccaggagtatgaggtcacctggtacatatcctggagcccctgcacaaagtgtacaagggatatggccacgttcctggccgaggacccgaaggttaccctgaccatcttcgttgcccgcctctactacttctgggacccagattaccaggaggcgcttcgcagcctgtgtcagaaaagagacggtccgcgtgccaccatgaagatcatgaattatgacgaatttcagcactgttggagcaagttcgtgtacagccaaagagagctatttgagccttggaataatctgcctaaatattatatattactgcacatcatgctgggggagattctcagacactcgatggatccacccacattcactttcaactttaacaatgaaccttgggtcagaggacggcatgagacttacctgtgttatgaggtggagcgcatgcacaatgacacctgggtcctgctgaaccagcgcaggggctttctatgcaaccaggctccacataaacacggtttccttgaaggccgccatgcagagctgtgcttcctggacgtgattcccttttggaagctggacctggaccaggactacagggttacctgcttcacctcctggagcccctgcttcagctgtgcccaggaaatggctaaattcatttcaaaaaacaaacacgtgagcctgtgcatcttcactgcccgcatctatgatgatcaaggaagatgtcaggaggggctgcgcaccctggccgaggctggggccaaaatttcaataatgacatacagtgaatttaagcactgctgggacacctttgtggaccaccagggatgtcccttccagccctgggatggactagatgagcacagccaagacctgagtgggaggctgcgggccattctccagaatcaggaaaactgaaggatgggcctcagtctctaaggaaggcagagacctgggttgagcctcagaataaaagatcttcttccaagaaatgcaaacaggctgttcaccaccatctccagctgatcacagacaccagcaaagcaatgcactcctgaccaagtagattcttttaaaaattagagtgcattactttgaatcaaaaatttatttatatttcaagaataaagtactaagattgtgctcaatacacagaaaagtttcaaacctactaatccagcgacaatttgaatcggttttgtaggtagaggaataaaatgaaatactaaatctttctgtaaaaaaaaaa

SEQ ID NO: 34 - DNA, 2856 bp, Homo sapiens
actttccctttcgaattcctcggtatatcttggggactggaggacctgtctggttattatacagacgcataactggaggtgggatccacacagctcagaacagctggatcttgctcagtctctgccaggggaagattccttggaggaggccctgcagcgacatggagggagctgctttgctgagagtctctgtcctctgcatctggatgagtgcacttttccttggtgtgggagtgagggcagaggaagctggagcgagggtgcaacaaaacgttccaagtgggacagatactggagatcctcaaagtaagcccctcggtgactgggctgctggcaccatggacccagagagcagtatctttattgaggatgccattaagtatttcaaggaaaaagtgagcacacagaatctgctactcctgctgactgataatgaggcctggaacggattcgtggctgctgctgaactgcccaggaatgaggcagatgagctccgtaaagctctggacaaccttgcaagacaaatgatcatgaaagacaaaaactggcacgataaaggccagcagtacagaaactggtttctgaaagagtttcctcggttgaaaagtgagcttgaggataacataagaaggctccgtgcccttgcagatggggttcagaaggtccacaaaggcaccaccatcgccaatgtggtgtctggctctctcagcatttcctctggcatcctgaccctcgtcggcatgggtctggcacccttcacagagggaggcagccttgtactcttggaacctgggatggagttgggaatcacagccgctttgaccgggattaccagcagtaccatggactacggaaagaagtggtggacacaagcccaagcccacgacctggtcatcaaaagccttgacaaattgaaggaggtgagggagtttttgggtgagaacatatccaactttctttccttagctggcaatacttaccaactcacacgaggcattgggaaggacatccgtgccctcagacgagccagagccaatcttcagtcagtaccgcatgcctcagcctcacgcccccgggtcactgagccaatctcagctgaaagcggtgaacaggtggagagggttaatgaacccagcatcctggaaatgagcagaggagtcaagctcacggatgtggcccctgtaagcttctttcttgtgctggatgtagtctacctcgtgtacgaatcaaagcacttacatgagggggcaaagtcagagacagctgaggagctgaagaaggtggctcaggagctggaggagaagctaaacattctcaacaataattataagattctgcaggcggaccaagaactgtgaccacagggcagggcagccaccaggagagatatgcctggcaggggccaggacaaaatgcaaacttttttttttttctgagacagagtcttgctctgtcgccaagttggagtgcaatggtgcgatctcagctcactgcaagctctgcctcccgtgttcaagcgattctcctgccttggcctcccaagtagctgggactacaggcgcctaccaccatgcccagctaatttttgtatttttaatagagatggggtttcaccatgttggccaggatggtctcgatctcctgacctcttgatctgcccaccttggcctcccaaagtgctgggattacaggcgtgagccatcgcttttgacccaaatgcaaacattttattagggggataaagagggtgaggtaaagtttatggaactgagtgttagggactttggcatttccatagctgagcacagcaggggaggggttaatgcagatggcagtgcagcaaggagaaggcaggaacattggagcctgcaataagggaaaaatgggaactggagagtgtggggaatgggaagaagcagtttactttagactaaagaatatattggggggccgggtgtagtggctcatgcctgtaatccgagcactttgggaggccaaggcgggcggatcacgaggtcaggagatcgagaccatcctggctaacacagtgaaaccccgtctctactaaaaatacaaaaaattagccgggcatggtggcgggcgcctgtagttccagctaactgggcggctgaggcaggagaatggcgtgaacctgggaggtggagcttgcagtgagccgagatatcgccactgcactccagcctgggtgacagagcgagactccatctcaaaaaaaaaaaaaaaaagaatatattgacggaagaatagagaggaggcttgaaggaaccagcaatgagaaggccaggaaaagaaagagctgaaaatggagaaagcccaagagttagaacagttggatacaggagaagaaacagcggctccactacagacccagccccaggttcaatgtcctccgaagaatgaagtctttccctggtgatggtcccctgccctgtctttccagcatccactctcccttgtcctcctgggggcatatctcagtcaggcagcggcttcctgatgatggtcattggggtggttgtcatgtgatgggtcccctccaggttactaaagggtgcatgtcccctgcttgaacactgaagggcaggtggtgggccatggccatggtccccagctgaggagcaggtgtccctgagaacccaaacttcccagagagtatgtgagaaccaaccaatgaaaacagtcccatcgctcttacccggtaagtaaacagtcagaaaattagcatgaaagcagtttagcattgggaggaagctcagatctctagagctgtcttgtcgccgcccaggattgacctgtgtgtaagtcccaataaactcacctactcatcaagctgga

SEQ ID NO: 35 - DNA, 3010 bp, Homo sapiens
actttccctttcgaattcctcggtatatcttggggactggaggacctgtctggttattatacagacgcataactggaggtgggatccacacagctcagaacagctggatcttgctcagtctctgccaggggaagattccttgacttctggggtgatggagaagaaacaggctgtgctgtgtccctaatgggaaacgtggctgagacaggggagtgagaagggtgcgttgcagaatggtgcctgtggcatgatgccagctttgcaatcatgagattcaaaagccacactgtggaattgaggaggccctgcagcgacatggagggagctgctttgctgagagtctctgtcctctgcatctggatgagtgcacttttccttggtgtgggagtgagggcagaggaagctggagcgagggtgcaacaaaacgttccaagtgggacagatactggagatcctcaaagtaagcccctcggtgactgggctgctggcaccatggacccagagagcagtatctttattgaggatgccattaagtatttcaaggaaaaagtgagcacacagaatctgctactcctgctgactgataatgaggcctggaacggattcgtggctgctgctgaactgcccaggaatgaggcagatgagctccgtaaagctctggacaaccttgcaagacaaatgatcatgaaagacaaaaactggcacgataaaggccagcagtacagaaactggtttctgaaagagtttcctcggttgaaaagtgagcttgaggataacataagaaggctccgtgcccttgcagatggggttcagaaggtccacaaaggcaccaccatcgccaatgtggtgtctggctctctcagcatttcctctggcatcctgaccctcgtcggcatgggtctggcacccttcacagagggaggcagccttgtactcttggaacctgggatggagttgggaatcacagccgctttgaccgggattaccagcagtaccatggactacggaaagaagtggtggacacaagcccaagcccacgacctggtcatcaaaagccttgacaaattgaaggaggtgagggagtttttgggtgagaacatatccaactttctttccttagctggcaatacttaccaactcacacgaggcattgggaaggacatccgtgccctcagacgagccagagccaatcttcagtcagtaccgcatgcctcagcctcacgcccccgggtcactgagccaatctcagctgaaagcggtgaacaggtggagagggttaatgaacccagcatcctggaaatgagcagaggagtcaagctcacggatgtggcccctgtaagcttctttcttgtgctggatgtagtctacctcgtgtacgaatcaaagcacttacatgagggggcaaagtcagagacagctgaggagctgaagaaggtggctcaggagctggaggagaagctaaacattctcaacaataattataagattctgcaggcggaccaagaactgtgaccacagggcagggcagccaccaggagagatatgcctggcaggggccaggacaaaatgcaaacttttttttttttctgagacagagtcttgctctgtcgccaagttggagtgcaatggtgcgatctcagctcactgcaagctctgcctcccgtgttcaagcgattctcctgccttggcctcccaagtagctgggactacaggcgcctaccaccatgcccagctaatttttgtatttttaatagagatggggtttcaccatgttggccaggatggtctcgatctcctgacctcttgatctgcccaccttggcctcccaaagtgctgggattacaggcgtgagccatcgcttttgacccaaatgcaaacattttattagggggataaagagggtgaggtaaagtttatggaactgagtgttagggactttggcatttccatagctgagcacagcaggggaggggttaatgcagatggcagtgcagcaaggagaaggcaggaacattggagcctgcaataagggaaaaatgggaactggagagtgtggggaatgggaagaagcagtttactttagactaaagaatatattggggggccgggtgtagtggctcatgcctgtaatccgagcactttgggaggccaaggcgggcggatcacgaggtcaggagatcgagaccatcctggctaacacagtgaaaccccgtctctactaaaaatacaaaaaattagccgggcatggtggcgggcgcctgtagttccagctaactgggcggctgaggcaggagaatggcgtgaacctgggaggtggagcttgcagtgagccgagatatcgccactgcactccagcctgggtgacagagcgagactccatctcaaaaaaaaaaaaaaaaagaatatattgacggaagaatagagaggaggcttgaaggaaccagcaatgagaaggccaggaaaagaaagagctgaaaatggagaaagcccaagagttagaacagttggatacaggagaagaaacagcggctccactacagacccagccccaggttcaatgtcctccgaagaatgaagtctttccctggtgatggtcccctgccctgtctttccagcatccactctcccttgtcctcctgggggcatatctcagtcaggcagcggcttcctgatgatggtcattggggtggttgtcatgtgatgggtcccctccaggttactaaagggtgcatgtcccctgcttgaacactgaagggcaggtggtgggccatggccatggtccccagctgaggagcaggtgtccctgagaacccaaacttcccagagagtatgtgagaaccaaccaatgaaaacagtcccatcgctcttacccggtaagtaaacagtcagaaaattagcatgaaagcagtttagcattgggaggaagctcagatctctagagctgtcttgtcgccgcccaggattgacctgtgtgtaagtcccaataaactcacctactcatcaagctgga

SEQ ID NO: 36 - DNA, 2444 bp, Homo sapiens
agcaggagggtgggaccaagggtgctgctggaccaaggatgggactgggccaagggtggggctgggaagcatcctgttttgcatgtttgatcaggagctgctgccaagttgtgactttcactttcccttttgggttccagggtatatctcagagcctggagaacgtgtctggttattatgcagatgcacggctggaggtgggatccacacagctcagaacagctggatcttgctcacactctttcaagagaagcttccttggacaaaaggaccctgccttggtgtgagagtgagggcagagggagctggagcaagtagaatttctctaaataccagctggctggggcccaggagattaaaaaacaccgggctaggttggtcttggcatttgctgacacgcaaagggattgcagagatccagcccctccaacctccctctgtccacaggtggctcacattcagtcccacaatttgctttctcctcctcaagggttaagaaaaaaaacgaacccttccagtcaggtcagtgactggagagctccatggaaagtctctcagtgacctggctgctggcaccatggactcagaaaagaaacgctttactgaagaggccaccaaatacttccgggagagagtcagcccagtgcatctgcaaatcctgctgactaacaatgaagcctggaagagattcgtgactgcggctgaattgcccagggatgaggcagatgctctctacgaagctctgaagaagcttagaacatatgcagctattgaggacgaatatgtgcagcagaaagatgagcagtttagggaatggtttttgaaagagtttccccaagtcaagaggaagatccaggagtccatagaaaagcttcgtgcccttgcaaatggtattgaagaggtccacagaggctgcaccatctccaatgtggtgtccagctccactggcgctgcctctggcatcatgtcccttgctggtcttgttttggcaccatttacagcagggacgagtctggcccttactgcagctggggtagggctgggagcagcgtctgctgtgactgggatcaccaccagcatcgtggagcactcatacacatcatcagcagaagctgaagccagcaggctgactgcaaccagcattgaccgattgaaggtatttaaggaagttatgcgtgacatcacacccaacttactttcccttcttaataattattacgaagccacacaaaccattgggagtgaaatccgtgccatcaggcaagccagagccagggcccgactccctgtgaccacctggcgaatctcagctggaagtggtggtcaagcagagagaacgattgcaggcaccacccgggcagtgagcagaggagcccggatcctgagtgcgaccacttcaggcatcttccttgcactggatgtggtcaaccttgtatacgagtcaaagcacttgcatgagggggcaaagtctgcatctgctgaggagctgaggcggcaggctcaggagctggaggagaatctaatggagctcactcagatctatcagcgtctgaatccatgccatacccactgaccccagaccagtgcagccagcaggggaggtgagccatacacaggccacgacaaaatgcaggcattttattagggggataaagagggcaaggtaaagtttatggagctgagtgttagtgactttggcatttctgtagctgagcacagcaggggaggggttaatgcagatggcaagtgcaccaaggagaaggcaggaatgctggagcctggaataagggaggagaggggactggagagtgtggggaataggaagaagaaatttcctttagactaacgaatatattggggggaggaatagaggggaggtgtgcaggaaccagcaatgagaaggccaggaaaagaaagagctgaaaatgcagaaagccgaagagttagaacttttggatacagcagaagaaacagcggctccactaccgacctgcccccggttcgatgtccttccaagaatgaagtctttccctggtgatggtcccctgccctgtctttccagcatccactctgtcttgtcctcctggaagtgtatctcagtcagccagtggcttcttgatgatggcggtggaggtggtggttgtagtgtgatggatcccctttaggttatttaggggtatatgtcccctgcttgaaccctgaaggccaggtaatgagccatggccattgtccccagctgaggaccaggtgtctctaaaaacccaaacatcctggagagtatgcgagaacctaccaagaaaaacagtctcattactcatatacagcaggcaaagagacagaaaattaactgaaaagcagtttagagactgggggaggccggatctctagagccatcctgctgagtgccctgtgtgtaagtcctaataaactcacctactcaccaa

SEQ ID NO: 37 - DNA, 2328 bp, Homo sapiens
agcaggagggtgggaccaagggtgctgctggaccaaggatgggactgggccaagggtggggctgggaagcatcctgttttgcatgtttgatcaggagctgctgccaagttgtgactttcactttcccttttgggttccagggtatatctcagagcctggagaacgtgtctggttattatgcagatgcacggctggaggtgggatccacacagctcagaacagctggatcttgctcacactctttcaagagaagcttccttggacaaaaggaccctgccttggtgtgagagtgagggcagagggagctggagcaagtagaatttctctaaataccagctggctggggcccaggagattaaaaaacaccgggctagggttaagaaaaaaaacgaacccttccagtcaggtcagtgactggagagctccatggaaagtctctcagtgacctggctgctggcaccatggactcagaaaagaaacgctttactgaagaggccaccaaatacttccgggagagagtcagcccagtgcatctgcaaatcctgctgactaacaatgaagcctggaagagattcgtgactgcggctgaattgcccagggatgaggcagatgctctctacgaagctctgaagaagcttagaacatatgcagctattgaggacgaatatgtgcagcagaaagatgagcagtttagggaatggtttttgaaagagtttccccaagtcaagaggaagatccaggagtccatagaaaagcttcgtgcccttgcaaatggtattgaagaggtccacagaggctgcaccatctccaatgtggtgtccagctccactggcgctgcctctggcatcatgtcccttgctggtcttgttttggcaccatttacagcagggacgagtctggcccttactgcagctggggtagggctgggagcagcgtctgctgtgactgggatcaccaccagcatcgtggagcactcatacacatcatcagcagaagctgaagccagcaggctgactgcaaccagcattgaccgattgaaggtatttaaggaagttatgcgtgacatcacacccaacttactttcccttcttaataattattacgaagccacacaaaccattgggagtgaaatccgtgccatcaggcaagccagagccagggcccgactccctgtgaccacctggcgaatctcagctggaagtggtggtcaagcagagagaacgattgcaggcaccacccgggcagtgagcagaggagcccggatcctgagtgcgaccacttcaggcatcttccttgcactggatgtggtcaaccttgtatacgagtcaaagcacttgcatgagggggcaaagtctgcatctgctgaggagctgaggcggcaggctcaggagctggaggagaatctaatggagctcactcagatctatcagcgtctgaatccatgccatacccactgaccccagaccagtgcagccagcaggggaggtgagccatacacaggccacgacaaaatgcaggcattttattagggggataaagagggcaaggtaaagtttatggagctgagtgttagtgactttggcatttctgtagctgagcacagcaggggaggggttaatgcagatggcaagtgcaccaaggagaaggcaggaatgctggagcctggaataagggaggagaggggactggagagtgtggggaataggaagaagaaatttcctttagactaacgaatatattggggggaggaatagaggggaggtgtgcaggaaccagcaatgagaaggccaggaaaagaaagagctgaaaatgcagaaagccgaagagttagaacttttggatacagcagaagaaacagcggctccactaccgacctgcccccggttcgatgtccttccaagaatgaagtctttccctggtgatggtcccctgccctgtctttccagcatccactctgtcttgtcctcctggaagtgtatctcagtcagccagtggcttcttgatgatggcggtggaggtggtggttgtagtgtgatggatcccctttaggttatttaggggtatatgtcccctgcttgaaccctgaaggccaggtaatgagccatggccattgtccccagctgaggaccaggtgtctctaaaaacccaaacatcctggagagtatgcgagaacctaccaagaaaaacagtctcattactcatatacagcaggcaaagagacagaaaattaactgaaaagcagtttagagactgggggaggccggatctctagagccatcctgctgagtgccctgtgtgtaagtcctaataaactcacctactcaccaa

SEQ ID NO: 38 - DNA, 2215 bp, Homo sapiens
agcaggagggtgggaccaagggtgctgctggaccaaggatgggactgggccaagggtggggctgggaagcatcctgttttgcatgtttgatcaggagctgctgccaagttgtgactttcactttcccttttgggttccagggtatatctcagagcctggagaacgtgtctggttattatgcagatgcacggctggaggtgggatccacacagctcagaacagctggatcttgctcacactctttcaagagaagcttccttgggttaagaaaaaaaacgaacccttccagtcaggtcagtgactggagagctccatggaaagtctctcagtgacctggctgctggcaccatggactcagaaaagaaacgctttactgaagaggccaccaaatacttccgggagagagtcagcccagtgcatctgcaaatcctgctgactaacaatgaagcctggaagagattcgtgactgcggctgaattgcccagggatgaggcagatgctctctacgaagctctgaagaagcttagaacatatgcagctattgaggacgaatatgtgcagcagaaagatgagcagtttagggaatggtttttgaaagagtttccccaagtcaagaggaagatccaggagtccatagaaaagcttcgtgcccttgcaaatggtattgaagaggtccacagaggctgcaccatctccaatgtggtgtccagctccactggcgctgcctctggcatcatgtcccttgctggtcttgttttggcaccatttacagcagggacgagtctggcccttactgcagctggggtagggctgggagcagcgtctgctgtgactgggatcaccaccagcatcgtggagcactcatacacatcatcagcagaagctgaagccagcaggctgactgcaaccagcattgaccgattgaaggtatttaaggaagttatgcgtgacatcacacccaacttactttcccttcttaataattattacgaagccacacaaaccattgggagtgaaatccgtgccatcaggcaagccagagccagggcccgactccctgtgaccacctggcgaatctcagctggaagtggtggtcaagcagagagaacgattgcaggcaccacccgggcagtgagcagaggagcccggatcctgagtgcgaccacttcaggcatcttccttgcactggatgtggtcaaccttgtatacgagtcaaagcacttgcatgagggggcaaagtctgcatctgctgaggagctgaggcggcaggctcaggagctggaggagaatctaatggagctcactcagatctatcagcgtctgaatccatgccatacccactgaccccagaccagtgcagccagcaggggaggtgagccatacacaggccacgacaaaatgcaggcattttattagggggataaagagggcaaggtaaagtttatggagctgagtgttagtgactttggcatttctgtagctgagcacagcaggggaggggttaatgcagatggcaagtgcaccaaggagaaggcaggaatgctggagcctggaataagggaggagaggggactggagagtgtggggaataggaagaagaaatttcctttagactaacgaatatattggggggaggaatagaggggaggtgtgcaggaaccagcaatgagaaggccaggaaaagaaagagctgaaaatgcagaaagccgaagagttagaacttttggatacagcagaagaaacagcggctccactaccgacctgcccccggttcgatgtccttccaagaatgaagtctttccctggtgatggtcccctgccctgtctttccagcatccactctgtcttgtcctcctggaagtgtatctcagtcagccagtggcttcttgatgatggcggtggaggtggtggttgtagtgtgatggatcccctttaggttatttaggggtatatgtcccctgcttgaaccctgaaggccaggtaatgagccatggccattgtccccagctgaggaccaggtgtctctaaaaacccaaacatcctggagagtatgcgagaacctaccaagaaaaacagtctcattactcatatacagcaggcaaagagacagaaaattaactgaaaagcagtttagagactgggggaggccggatctctagagccatcctgctgagtgccctgtgtgtaagtcctaataaactcacctactcaccaa

SEQ ID NO: 39 - DNA, 3627 bp, Homo sapiens
actctggggaaaggagggtacaaccacatgtaaattttattataatgatggtataatgaacttggggtgacctgagggcatgtttttgtgttactgggcatgtgcccctttaggagacttccacctgtgccttactttctctttctttgggatgtgctggccacagactttaccaaaaactccatccattaggatggcattaggacggttctggggctaaacttaggtgggccaggggctgtttcactgtcagcctttctactctcttttcttacccactcctagctgctaatgtctatttaactacctaatatttccccctttagagaaaaaaagccaaatttttgggtagatcggtgacaattaatctggctacttcctgctgacaagaggcagtggtaataattgggttctcttttttgctctcttgtagctggtaggttgggcagagaaaagtggtggccatccaaggggcccacgtagatatcagacatggttgagacctcgcggtaaccttgtgtagaatcatttggagttttatggattctaggtgggaagaaacaaaacaaccttgtaaatcaaatgagcatcgtttgaaagctataagttgtataaagctgttttaggaccaagaaagggggctaaccaggaaaaccaggaccagttgttaaatttccaccagtcaaagcctcctgaaactctgttttccattaacttgttggccctgtctgtaatttttttaagttggtttgcactttacctgattggttgatgaaaacagcaatgtttatcaagtgttgcacaagctcccccttgattggctgtgagcaaattaaaagctcatcaatttcataagactatgcttgctaatgaagcaatttgttctgaaagggtattgacctggttagttagattaataatttgttgagtaatttttaagaagagtttctgggcagtaaaaatggagttaaggaggtcctccagttcccgtgccaataccagccagaacgccaattatagtcagtgctgttaaaactcctctttcagttttaccagattgagcgtgtatagggaggggaatgctatcgataagagtgagtttggggatgatgtaaactagggccaaatccccgtttaattagcagacaagcagagatatgccttgtttctatacaaaaatgtgatttgtcatgttaagacaaatatcaacagtgatactaaagtagggtttttccatgctgtgtaagtctgctttaataccctcagaagtggaagtcaaggctagttcatgtaatgggggaacacaggcagtacttgacagaatgaaagaggaatcaaaagcccaattagaggaaggagtgatgggatcccaaccaatattgtgaaattatggggagctgcagttttttgcaatgattttgcccgaagttgtgagactgaaaccagaagttgttatgtttaaaatgatattctggtgtgggtctggggaaaagggtagatccagaatagctggcttctttccacatagtggttctgttggggggcttgggaaatgaataaaacacaaagaagaattagaatatcaggtgaaggtagcaggtgctcctggcagaagaacccacataaggaagtgtccagaagccacacagggtatatctcagagcctggagaacgtgtctggttattatgcagatgcacggctggaggtgggatccacacagctcagaacagctggatcttgctcacactctttcaagagaagcttccttgaaaagaaacgctttactgaagaggccaccaaatacttccgggagagagtcagcccagtgcatctgcaaatcctgctgactaacaatgaagcctggaagagattcgtgactgcggctgaattgcccagggatgaggcagatgctctctacgaagctctgaagaagcttagaacatatgcagctattgaggacgaatatgtgcagcagaaagatgagcagtttagggaatggtttttgaaagagtttccccaagtcaagaggaagatccaggagtccatagaaaagcttcgtgcccttgcaaatggtattgaagaggtccacagaggctgcaccatctccaatgtggtgtccagctccactggcgctgcctctggcatcatgtcccttgctggtcttgttttggcaccatttacagcagggacgagtctggcccttactgcagctggggtagggctgggagcagcgtctgctgtgactgggatcaccaccagcatcgtggagcactcatacacatcatcagcagaagctgaagccagcaggctgactgcaaccagcattgaccgattgaaggtatttaaggaagttatgcgtgacatcacacccaacttactttcccttcttaataattattacgaagccacacaaaccattgggagtgaaatccgtgccatcaggcaagccagagccagggcccgactccctgtgaccacctggcgaatctcagctggaagtggtggtcaagcagagagaacgattgcaggcaccacccgggcagtgagcagaggagcccggatcctgagtgcgaccacttcaggcatcttccttgcactggatgtggtcaaccttgtatacgagtcaaagcacttgcatgagggggcaaagtctgcatctgctgaggagctgaggcggcaggctcaggagctggaggagaatctaatggagctcactcagatctatcagcgtctgaatccatgccatacccactgaccccagaccagtgcagccagcaggggaggtgagccatacacaggccacgacaaaatgcaggcattttattagggggataaagagggcaaggtaaagtttatggagctgagtgttagtgactttggcatttctgtagctgagcacagcaggggaggggttaatgcagatggcaagtgcaccaaggagaaggcaggaatgctggagcctggaataagggaggagaggggactggagagtgtggggaataggaagaagaaatttcctttagactaacgaatatattggggggaggaatagaggggaggtgtgcaggaaccagcaatgagaaggccaggaaaagaaagagctgaaaatgcagaaagccgaagagttagaacttttggatacagcagaagaaacagcggctccactaccgacctgcccccggttcgatgtccttccaagaatgaagtctttccctggtgatggtcccctgccctgtctttccagcatccactctgtcttgtcctcctggaagtgtatctcagtcagccagtggcttcttgatgatggcggtggaggtggtggttgtagtgtgatggatcccctttaggttatttaggggtatatgtcccctgcttgaaccctgaaggccaggtaatgagccatggccattgtccccagctgaggaccaggtgtctctaaaaacccaaacatcctggagagtatgcgagaacctaccaagaaaaacagtctcattactcatatacagcaggcaaagagacagaaaattaactgaaaagcagtttagagactgggggaggccggatctctagagccatcctgctgagtgccctgtgtgtaagtcctaataaactcacctactcaccaa

SEQ ID NO: 40 - DNA, 2118 bp, Homo sapiens
agcaggagggtgggaccaagggtgctgctggaccaaggatgggactgggccaagggtggggctgggaagcatcctgttttgcatgtttgatcaggagctgctgccaagttgtgactttcactttcccttttgggttccagggtatatctcagagcctggagaacgtgtctggttattatgcagatgcacggctggaggtgggatccacacagctcagaacagctggatcttgctcacactctttcaagagaagcttccttgaaaagaaacgctttactgaagaggccaccaaatacttccgggagagagtcagcccagtgcatctgcaaatcctgctgactaacaatgaagcctggaagagattcgtgactgcggctgaattgcccagggatgaggcagatgctctctacgaagctctgaagaagcttagaacatatgcagctattgaggacgaatatgtgcagcagaaagatgagcagtttagggaatggtttttgaaagagtttccccaagtcaagaggaagatccaggagtccatagaaaagcttcgtgcccttgcaaatggtattgaagaggtccacagaggctgcaccatctccaatgtggtgtccagctccactggcgctgcctctggcatcatgtcccttgctggtcttgttttggcaccatttacagcagggacgagtctggcccttactgcagctggggtagggctgggagcagcgtctgctgtgactgggatcaccaccagcatcgtggagcactcatacacatcatcagcagaagctgaagccagcaggctgactgcaaccagcattgaccgattgaaggtatttaaggaagttatgcgtgacatcacacccaacttactttcccttcttaataattattacgaagccacacaaaccattgggagtgaaatccgtgccatcaggcaagccagagccagggcccgactccctgtgaccacctggcgaatctcagctggaagtggtggtcaagcagagagaacgattgcaggcaccacccgggcagtgagcagaggagcccggatcctgagtgcgaccacttcaggcatcttccttgcactggatgtggtcaaccttgtatacgagtcaaagcacttgcatgagggggcaaagtctgcatctgctgaggagctgaggcggcaggctcaggagctggaggagaatctaatggagctcactcagatctatcagcgtctgaatccatgccatacccactgaccccagaccagtgcagccagcaggggaggtgagccatacacaggccacgacaaaatgcaggcattttattagggggataaagagggcaaggtaaagtttatggagctgagtgttagtgactttggcatttctgtagctgagcacagcaggggaggggttaatgcagatggcaagtgcaccaaggagaaggcaggaatgctggagcctggaataagggaggagaggggactggagagtgtggggaataggaagaagaaatttcctttagactaacgaatatattggggggaggaatagaggggaggtgtgcaggaaccagcaatgagaaggccaggaaaagaaagagctgaaaatgcagaaagccgaagagttagaacttttggatacagcagaagaaacagcggctccactaccgacctgcccccggttcgatgtccttccaagaatgaagtctttccctggtgatggtcccctgccctgtctttccagcatccactctgtcttgtcctcctggaagtgtatctcagtcagccagtggcttcttgatgatggcggtggaggtggtggttgtagtgtgatggatcccctttaggttatttaggggtatatgtcccctgcttgaaccctgaaggccaggtaatgagccatggccattgtccccagctgaggaccaggtgtctctaaaaacccaaacatcctggagagtatgcgagaacctaccaagaaaaacagtctcattactcatatacagcaggcaaagagacagaaaattaactgaaaagcagtttagagactgggggaggccggatctctagagccatcctgctgagtgccctgtgtgtaagtcctaataaactcacctactcaccaa

SEQ ID NO: 41 - DNA, 3564 bp, Homo sapiens
actctggggaaaggagggtacaaccacatgtaaattttattataatgatggtataatgaacttggggtgacctgagggcatgtttttgtgttactgggcatgtgcccctttaggagacttccacctgtgccttactttctctttctttgggatgtgctggccacagactttaccaaaaactccatccattaggatggcattaggacggttctggggctaaacttaggtgggccaggggctgtttcactgtcagcctttctactctcttttcttacccactcctagctgctaatgtctatttaactacctaatatttccccctttagagaaaaaaagccaaatttttgggtagatcggtgacaattaatctggctacttcctgctgacaagaggcagtggtaataattgggttctcttttttgctctcttgtagctggtaggttgggcagagaaaagtggtggccatccaaggggcccacgtagatatcagacatggttgagacctcgcggtaaccttgtgtagaatcatttggagttttatggattctaggtgggaagaaacaaaacaaccttgtaaatcaaatgagcatcgtttgaaagctataagttgtataaagctgttttaggaccaagaaagggggctaaccaggaaaaccaggaccagttgttaaatttccaccagtcaaagcctcctgaaactctgttttccattaacttgttggccctgtctgtaatttttttaagttggtttgcactttacctgattggttgatgaaaacagcaatgtttatcaagtgttgcacaagctcccccttgattggctgtgagcaaattaaaagctcatcaatttcataagactatgcttgctaatgaagcaatttgttctgaaagggtattgacctggttagttagattaataatttgttgagtaatttttaagaagagtttctgggcagtaaaaatggagttaaggaggtcctccagttcccgtgccaataccagccagaacgccaattatagtcagtgctgttaaaactcctctttcagttttaccagattgagcgtgtatagggaggggaatgctatcgataagagtgagtttggggatgatgtaaactagggccaaatccccgtttaattagcagacaagcagagatatgccttgtttctatacaaaaatgtgatttgtcatgttaagacaaatatcaacagtgatactaaagtagggtttttccatgctgtgtaagtctgctttaataccctcagaagtggaagtcaaggctagttcatgtaatgggggaacacaggcagtacttgacagaatgaaagaggaatcaaaagcccaattagaggaaggagtgatgggatcccaaccaatattgtgaaattatggggagctgcagttttttgcaatgattttgcccgaagttgtgagactgaaaccagaagttgttatgtttaaaatgatattctggtgtgggtctggggaaaagggtagatccagaatagctggcttctttccacatagtggttctgttggggggcttgggaaatgaataaaacacaaagaagaattagaatatcagggtatatctcagagcctggagaacgtgtctggttattatgcagatgcacggctggaggtgggatccacacagctcagaacagctggatcttgctcacactctttcaagagaagcttccttgaaaagaaacgctttactgaagaggccaccaaatacttccgggagagagtcagcccagtgcatctgcaaatcctgctgactaacaatgaagcctggaagagattcgtgactgcggctgaattgcccagggatgaggcagatgctctctacgaagctctgaagaagcttagaacatatgcagctattgaggacgaatatgtgcagcagaaagatgagcagtttagggaatggtttttgaaagagtttccccaagtcaagaggaagatccaggagtccatagaaaagcttcgtgcccttgcaaatggtattgaagaggtccacagaggctgcaccatctccaatgtggtgtccagctccactggcgctgcctctggcatcatgtcccttgctggtcttgttttggcaccatttacagcagggacgagtctggcccttactgcagctggggtagggctgggagcagcgtctgctgtgactgggatcaccaccagcatcgtggagcactcatacacatcatcagcagaagctgaagccagcaggctgactgcaaccagcattgaccgattgaaggtatttaaggaagttatgcgtgacatcacacccaacttactttcccttcttaataattattacgaagccacacaaaccattgggagtgaaatccgtgccatcaggcaagccagagccagggcccgactccctgtgaccacctggcgaatctcagctggaagtggtggtcaagcagagagaacgattgcaggcaccacccgggcagtgagcagaggagcccggatcctgagtgcgaccacttcaggcatcttccttgcactggatgtggtcaaccttgtatacgagtcaaagcacttgcatgagggggcaaagtctgcatctgctgaggagctgaggcggcaggctcaggagctggaggagaatctaatggagctcactcagatctatcagcgtctgaatccatgccatacccactgaccccagaccagtgcagccagcaggggaggtgagccatacacaggccacgacaaaatgcaggcattttattagggggataaagagggcaaggtaaagtttatggagctgagtgttagtgactttggcatttctgtagctgagcacagcaggggaggggttaatgcagatggcaagtgcaccaaggagaaggcaggaatgctggagcctggaataagggaggagaggggactggagagtgtggggaataggaagaagaaatttcctttagactaacgaatatattggggggaggaatagaggggaggtgtgcaggaaccagcaatgagaaggccaggaaaagaaagagctgaaaatgcagaaagccgaagagttagaacttttggatacagcagaagaaacagcggctccactaccgacctgcccccggttcgatgtccttccaagaatgaagtctttccctggtgatggtcccctgccctgtctttccagcatccactctgtcttgtcctcctggaagtgtatctcagtcagccagtggcttcttgatgatggcggtggaggtggtggttgtagtgtgatggatcccctttaggttatttaggggtatatgtcccctgcttgaaccctgaaggccaggtaatgagccatggccattgtccccagctgaggaccaggtgtctctaaaaacccaaacatcctggagagtatgcgagaacctaccaagaaaaacagtctcattactcatatacagcaggcaaagagacagaaaattaactgaaaagcagtttagagactgggggaggccggatctctagagccatcctgctgagtgccctgtgtgtaagtcctaataaactcacctactcaccaa

SEQ ID NO: 42 - DNA, 1315 bp, Homo sapiens
ggagataagagtatcttgcacagcaggtgcaggtttcccagcagctcaggcaagagtccgatgtttgtgccatctgatcctgatgtctggagagatagccatgtgtgagcctgaatttggcaatgacaaggccagggagccgagcgtgggtggcaggtggcgagtgtcctggtacgaacggtttgtgcagccatgtctggtcgaactgctgggctctgctctcttcatcttcatcgggtgcctgtcggtcattgagaatgggacggacactgggctgctgcagccggccctggcccacgggctggctttggggctcgtgattgccacgctggggaatatcagtggtggacacttcaaccctgcggtgtccctggcagccatgctgatcggaggcctcaacctggtgatgctcctcccgtactgggtctcacagctgctcggggggatgctcggggctgccttggccaaggcggtgagtcctgaggagaggttctggaatgcatctggggcggcctttgtgacagtccaggagcaggggcaggtggcaggggcgttggtggcagagatcatcctgacgacgctgctggccctggctgtatgcatgggtgccatcaatgagaagacaaagggccctctggccccgttctccatcggctttgccgtcaccgtggatatcctggctgggggccctgtgtctggaggctgcatgaatcccgcccgtgcttttggacctgcggtggtggccaaccactggaacttccactggatctactggctgggcccactcctggctggcctgcttgttggactgctcattaggtgcttcattggagatgggaagacccgcctcatcctgaaggctcggtgaagcagagctcgtgggattcctgctgctccaggtgtcctcagctcacctgtcccagactgaggacaggggagttcctgcatttcctgccagggcagaggcccagaggagcgaccccctgcttccactgcttgggcctgctttctcagatagactgactgctgaggaggctctaggttcttggaattcctttgtgctcatcagagaccccagcctggggaacacgctgcccgcactgcccagagagcagtgcaaacaccacaacacgagcgtgtttcttgagaggaatgtccccgagttggacaaggaggctgtttctgcacatcagctcatttcccgcaccccatttcttgcttgattgctttgttgggggcctggccacttccttgcttctcaagctgacaattctcactttgcaataaatagtccagtgtttccttccaaaaaaaa

SEQ ID NO: 43 - DNA, 2725 bp, Homo sapiens
gttacgcgcagccccgcccccgcggcctcgtcgctcctgctgaggcggtagccgcttttcgtcgactcttaccggttggctgggccagctgcgccgcggctcacagctgacgatgggggaccccagcaagcaggacatcttgaccatcttcaagcgcctccgctcggtgcccactaacaaggtgtgttttgattgtggtgccaaaaatcccagctgggcaagcataacctatggagtgttcctttgcattgattgctcagggtcccaccggtcacttggtgttcacttgagttttattcgatctacagagttggattccaactggtcatggtttcagttgcgatgcatgcaagtcggaggaaacgctagtgcatcttccttttttcatcaacatgggtgttccaccaatgacaccaatgccaagtacaacagtcgtgctgctcagctctatagggagaaaatcaaatcgctcgcctctcaagcaacacggaagcatggcactgatctgtggcttgatagttgtgtggttccacctttgtcccctccaccaaaggaggaagatttttttgcctctcacgtttctcctgaggtgagtgacacagcgtgggcatcagcaatagcagaaccatcttctttaacatcaaggcctgtggaaaccactttggaaaataatgaaggtggacaagagcaaggaccaagtgtggaaggtcttaatgtaccaacaaaggctactttagaggtatcctctatcataaaaaagaaaccaaatcaagctaaaaaaggccttggggccaaaaaaggaagtttgggagctcagaaactggcaaacacatgctttaatgaaattgaaaaacaagctcaagctgcggataaaatgaaggagcaggaagacctggccaaggtggtatctaaagaagaatcaattgtttcatcattacgattagcctataaggatcttgaaattcaaatgaagaaagacgaaaagatgaacattagtggcaaaaaaaatgttgactcagacagactcggcatgggatttggaaattgcagaagtgttatttcacattcagtgacttcagatatgcagaccatagagcaggaatcacccattatggcaaaaccaagaaaaaagtataatgatgacagtgacgattcatattttacttccagctcaaggtactttgacgagccagtggagttaaggagcagttctttctctagctgggatgacagttcagattcctattggaaaaaagagaccagcaaagatactgaaacagttctgaaaaccacaggctattcagacagacctactgctcgccgcaagccagattatgagccagttgaaaatacagatgaggcccagaagaagtttggcaatgtcaaggccatttcatcagatatgtattttggaagacaatcccaggctgattatgagaccagggcccgcctagagaggctgtcggcaagttcctccataagctcggctgatctgttcgaggagccgaggaagcagccagcagggaactacagcctgtccagtgtgctgcccaacgcccccgacatggcgcagttcaagcagggagtgagatcggttgctggaaaactctccgtctttgctaatggagtcgtgacttcaattcaggatcgctacggttcttaatactgaagtcatgatgtgtatttcctggagaaattcctctttaaatgaacaagtaaccacatctcaggcggcagtgaagtccagatagttttgcagattgttttgctactttttcatatggtatatgtttctgatttttaatatttcttttgagaaattctgagttctgatgtaggagctttcctgtgatttctgtttcacgttccttcctgtcacaccctcctttggcgtctctgtgtatatccttgctttattttcttggaacctttgatttcaacactgagggcctggagacctcggctcctcctgctcctgaaccaggaggcttcatgtgggggaggaggagaggtctccatgtgacacatgggctcagggctgccagaatcagcggatgctggatgggcctgcagaaacaacactcaccacacacacttccttcaaaagaccaaaagtgactggtgtctcgtgtgacagattgcttcatttatgtttctacatagtaaggtgactgccaaataatatttgaagtcatctgtctctttgtaaattattttatatgacctataaatttaaaaatgtttttcagtgagtgcttttaacaaacttaagcttctgccctgccaagggaattaatgttatcttgtgaaaggtgttgctgtttgaattgatgagaaatggaagatgagaactccctaagagttctcataataaatcatctcatcacaaatcaatacggtatacagagttaaagtggaatgaggtaagaagatacagctacagaaaatagttgcgtgtatgggagaacagtcattgtaattgggtagttttgttaataaatatttttaaatcttgcttttcagaaattaccgaatgtgtataaacaaataaagaaaaataatttagctgtgttttagacagcattagaatatattgttcagcacagtaaaatatatttgaaatttgataagccaaaaatgtggttttgaatgaatattttgtgaatctttcttaaaagctcaaatttgtagacttctaaatagaataaacacttgcagcagatgg

SEQ ID NO: 44 - DNA, 3561 bp, Homo sapiens
ccggctgtcggtctccgtgtcgccgccgccgcccggcatcgtggagctggggcccccttttgcctgggagttttgtagtcgcctagggtcagcggtgacatcccaaagggcaggcccggcagccgccatggtggccaaggattaccccttctacctcacggtcaagagagcgaactgcagcctggagctacctccggccagcggtccggccaaggacgctgaggagcctagtaataaacgggtcaaacccctttcccgagtcacgtcgctagcaaacctcatcccgcccgtgaaggccacgccattaaagcgcttcagtcaaaccctgcagcgctccattagcttccgcagtgagagccgccctgacatcctcgccccccgaccctggtccagaaatgccgccccctcgagcacgaaacggagagatagcaagctgtggagtgagaccttcgatgtgtgcgtcaatcagatgcttacatccaaggaaatcaaacgtcaggaggcgatctttgagctttcccaaggagaagaagacttgatagaagacttgaaattagcaaaaaaggcctatcatgaccccatgctgaaactctccataatgacagaacaagagttgaatcaaatttttggaacactggactctctaattcctctacatgaagagctccttagtcagcttcgagatgttaggaagcctgatggctcgactgaacatgttggtcccatcctcgtgggctggctcccttgcctcagctcctatgatagctactgcagcaatcaagtagccgccaaagctctgctggaccacaaaaagcaagatcaccgagtccaggatttcctacagcgatgtttagaatccccctttagccgcaaactagatctctggaatttcctcgatattccaagaagccgcctggtaaaataccctctgcttctccgagaaatcttgaggcacacaccaaatgataatccagatcagcagcacttggaagaagctataaatatcattcagggaattgtggcagaaatcaacaccaagactggtgaatctgaatgccgctattataaagagcggcttctttacttggaagaaggccagaaagactccctgatcgacagctctcgagtcttgtgttgtcatggtgaactgaagaacaatcggggcgtgaaactgcatgttttcctgttccaagaagtgcttgtgatcactcgagccgtcacccacaatgagcagctttgctaccagctgtaccgtcagccaatccccgtgaaagacctcctgctggaagacctccaggatggagaagtgaggctgggtggctccctgcgaggggcattcagcaacaatgagagaattaaaaacttcttcagagtcagtttcaaaaatggatcccaaagtcagacccactcgctacaagccaatgacactttcaacaaacagcagtggcttaactgtattcgtcaagccaaagaaacagttttgtgtgctgccgggcaagctggggtgcttgactccgagggatcgttcctaaatcccaccaccgggagcagagagctacagggagaaacaaaacttgagcagatggaccaatcggacagtgagtcagactgtagtatggacacgagtgaggtcagcctcgactgtgagcgcatggaacagacagactcttcctgtggaaacagcaggcacggtgaaagtaacgtctgacagaagcatgtgcacttcgggaagcaggcctgcatcttacctgtacagtatttgcattccacagatggaacggtttggagaagcactttttcatacttttgtgaaagtatacatgttggcccagtctctcgtatctgtacctttgtccctagtactgtaactgccaatctgtctgtgtaagctggaatctgtggcaactattaccctgtgttgtatttcccaagtgtctggatggatggagaggtactcaaacaagttactttcagttgtcctgctggattttaaaaaaatagaaaaagaatctcaaaactactgttttacatagattgtttgaagagtccttcctcttgtgcttctgtaccactttcccagctcttagatgtggtagctaaaggcacggaatttagacggccttgtaaatagggcatgaggaactcatctgtgtattgggatggtattagagagagaatcaggaaagaccaactcatgaagtgaacttggtttgatcttactcaactagaaagcttgaaaacatccctggggattctgaaggcttaattttgcaaaggaggatgcattgtctgaactttgcaacttcatccagtgcaagtttgatgcaagaatgtattaggacataaaatagaggctgaccttaaaagggccaggacagaagcggctgccagctctgaatctttaactgaaatgcacatggcaccaggaggtgtctctcatagttggttgctagcctaaaacatcagaatagaacccaaagggcttaggaaggcctgccaggataacaagaaggccctgtattcattgtgtttcatctgcctaggcctactcattattttagagaatgaatgaagcaacaaggaagagagaacatgactctatcgatgacactgtttatagaaacacaggagaggaagaatttggaatgaaaagcacttcgtcagaaccttctgtgggagccattgagagaaaagcatggtccagtgccttctgagaaaggccagagctttgggctttcctgctctgcttttgggtcgtcaatttgccatctctggttctgtgctataatcagaattgtaattatgttctccagaggccaatttcattaactctgattaattagaatcagctagccagattagtaacctctttgtccagccttgatttacagtgcagggtaaagtgcagaccttaaaaacagctaagtacctagaagagctccctgcaagtgtaaatattaaggatgacctgtgcaaaattatacccacaccagcactagtggtaattattctaaattattgccaaaaagttttttttaatctgtctttcaagtttacagaaaagaaagcagtaaatgcattgatgtcattttattatgtacatatatcatgtgcattcaagctgtgtgacaagatatatcaatataaaaacaaggtatatactttattattttttgaaaacaaggatattgtgatcaattttaccctgtaaaacatatttctgtatttataggtcttaaacatgatgaattttttctattacaagtttatttaaaactgctttctcaagtcgttattgatacagcaagtgaacctgctgcagacagaagcagaggaaagccaagaacagcctttattggtgaagaaaagaatgaatgattctttgtaggcgccatcagccacttttagaagccatcagccagtgtgttgggaaaagaggtttgtcaagtgttggcctatgggaaggtggtcaatgaatgttttgatgaaatgaatgtttttgtataatggccttaaacttttctggaagtatttcaaataaattacattattaagtcatca

SEQ ID NO: 45 - DNA, 2858 bp, Homo sapiens
cttaaagccctgaccgtcgttctccgtcctcctctgggtaccaactctattgcgcagctcgctgccgtgcgtttaacccaggcgaggaggaggaggagaaaattcccccagattcgggcaggcccgcaccccacattccgtcctgttttgagaggaggagggaagagaaataaacgtggcagcgcatagaaggccagcagggagactgctttccagacacctccggcccacacagccgttcaccccccgtcttttcagtcctggaaaaggaattcggtctgtccttaggatgaagctctaactgaactgaagtaaggagaaacagccttgaatctttggagggtctgtcttccttttgggctctgtgcaactgcagctacagtggaaaaaagcaaactgctcttgatcccaggccctgcctaagcctcagcagaacttgtaagcctaaactgaagagcctcacccggacgagcaggcatcccttaaccttaagcaatccagttccacgccctggatcagtgaataaccccagctgcaccatgagccgcgttcgggatgctggctgtgtagcggcggggatagtgataggggctggtgcctggtactgtgtctacaaatacaccagggggagagaccagaccaagaagagaatggccaagcccaaaaaccgggctgtggctgggactggagccagggctagagctgggctaagagccggattcacaatcgaccttgggtcaggattcagtcccccaaccccagtccgtgctgaagcagaggacagggcccaggatgaagcctctgctctggacacagttggagctgaggcagtggccccagctgcatccagcgctgaggctcagagtggggcaggcagtcaggcccaagaggcagatggagccggggttgggcctaaggccgaatcagtagttggggctgcaatggcttctgcaatagcaccacctcccggggtgacagaggcccttggggctgcagaagcccctgcaatggcaggggctcccaaagtggcagaagctcccagagaagcggagacttccagggcagcggtgcctcctgggacagtggtgcctaccgaagcggcagcacccactgaggtgaccgagggtcctggggtagcagcacctaccaaggtagctgaagctcccggggtggcatcgcctaccgaggcagctgaggctcctgtgcccgcaacgcctactggggctgcagcacctactggggctgcagagtctcctggaacttctggttcccctagaacagcggtggttcctggaacatcagctgccaagaaagcaacccctggggctcacactggggctataccgaaagccacatcagcgactggagcggtacccaaaggtggaggcaagggtgtaaccaggtcccggaatgggggcaagggcaagggcaagaaaagcaaagttgaagtagacgaactggggatgggcttccgtcctggagatggggctgcagcagctgctgcagcctctgctaatggcggacaggctttcctggcagaggtccctgattctgaggaaggggagtccgggtggactgacacagagtcagattcagactctgagcccgagacccagcgcagagggaggggaagaagacccgttgccatgcagaagcgcccctttccttatgaaattgatgagattctgggtgtccgcgatctcaggaaggtccttgccttgcttcagaaatctgatgatcctttcatccaacaggtagctttgctcactctgagcaacaatgccaattattcatgcaatcaagagacaatccgcaaattgggaggcctcccaattattgcaaacatgatcaacaaaactgatccacacattaaggaaaaagccttaatggccatgaataacctgagtgagaattatgaaaatcagggccggcttcaggtgtacatgaataaagtgatggatgatatcatggcctctaacctgaactcagcagttcaagtagttggactaaaatttctaacaaacatgactattactaatgactaccagcacctgcttgtcaattccattgcaaactttttccgtttgctatctcagggaggtggaaaaatcaaggttgagattttgaaaatcctttcgaattttgctgaaaatccagatatgttgaagaaacttctcagtacccaagtgccagcatcatttagttccctctataattcttacgtggaatcagaaatccttattaatgcccttactctatttgagattatctatgacaatctcagagcagaagtgtttaactatagagaattcaataaaggttcccttttttacttatgcactacatctggagtgtgtgttaagaaaattagagccttagcaaatcaccatgacctcttagtgaaagtgaaagttataaaactagtgaacaaattctgattggttatgtaccgtcaaaagacttgaagaaatttcatgattttgcagtgtggaagcgttgaaaattgaaagttactgcttttccacttgctcatatagtaaagggatcctttcagctgccagtgttgaataatgtatcatccagagtgatgttatctgtgacagtcaccagctttaagctgaaccattttatgaataccaaataaatagacctcttgtactgaaaacatatttgtgactttaatcgtgctgcttggatagaaatatttttactggttcttctgaattgacagtaaacctgtccattatgaatggcctactgttctattatttgttttgacttgaatttatccaccaaagacttcatttgtgtatcatcaataaagttgtatgtttcaactgacaaaaaaaaaaaaaaaa

SEQ ID NO: 46 - DNA, 2807 bp, Homo sapiens
cttaaagccctgaccgtcgttctccgtcctcctctgggtaccaactctattgcgcagctcgctgccgtgcgtttaacccaggcgaggaggaggaggagaaaattcccccagattcgggcagacacctccggcccacacagccgttcaccccccgtcttttcagtcctggaaaaggaattcgggctttcattgtctaacgtcgacagtctatatttctgctcttcagtctgtccttaggatgaagctctaactgaactgaagtaaggagaaacagccttgaatctttggagggtctgtcttccttttgggctctgtgcaactgcagctacagtggaaaaaagcaaactgctcttgatcccaggccctgcctaagcctcagcagaacttgtaagcctaaactgaagagcctcacccggacgagcaggcatcccttaaccttaagcaatccagttccacgccctggatcagtgaataaccccagctgcaccatgagccgcgttcgggatgctggctgtgtagcggcggggatagtgataggggctggtgcctggtactgtgtctacaaatacaccagggggagagaccagaccaagaagagaatggccaagcccaaaaaccgggctgtggctgggactggagccagggctagagctgggctaagagccggattcacaatcgaccttgggtcaggattcagtcccccaaccccagtccgtgctgaagcagaggacagggcccaggatgaagcctctgctctggacacagttggagctgaggcagtggccccagctgcatccagcgctgaggctcagagtggggcaggcagtcaggcccaagaggcagatggagccggggttgggcctaaggccgaatcagtagttggggctgcaatggcttctgcaatagcaccacctcccggggtgacagaggcccttggggctgcagaagcccctgcaatggcaggggctcccaaagtggcagaagctcccagagaagcggagacttccagggcagcggtgcctcctgggacagtggtgcctaccgaagcggcagcacccactgaggtgaccgagggtcctggggtagcagcacctaccaaggtagctgaagctcccggggtggcatcgcctaccgaggcagctgaggctcctgtgcccgcaacgcctactggggctgcagcacctactggggctgcagagtctcctggaacttctggttcccctagaacagcggtggttcctggaacatcagctgccaagaaagcaacccctggggctcacactggggctataccgaaagccacatcagcgactggagcggtacccaaaggtggaggcaagggtgtaaccaggtcccggaatgggggcaagggcaagggcaagaaaagcaaagttgaagtagacgaactggggatgggcttccgtcctggagatggggctgcagcagctgctgcagcctctgctaatggcggacaggctttcctggcagaggtccctgattctgaggaaggggagtccgggtggactgacacagagtcagattcagactctgagcccgagacccagcgcagagggaggggaagaagacccgttgccatgcagaagcgcccctttccttatgaaattgatgagattctgggtgtccgcgatctcaggaaggtccttgccttgcttcagaaatctgatgatcctttcatccaacaggtagctttgctcactctgagcaacaatgccaattattcatgcaatcaagagacaatccgcaaattgggaggcctcccaattattgcaaacatgatcaacaaaactgatccacacattaaggaaaaagccttaatggccatgaataacctgagtgagaattatgaaaatcagggccggcttcaggtgtacatgaataaagtgatggatgatatcatggcctctaacctgaactcagcagttcaagtagttggactaaaatttctaacaaacatgactattactaatgactaccagcacctgcttgtcaattccattgcaaactttttccgtttgctatctcagggaggtggaaaaatcaaggttgagattttgaaaatcctttcgaattttgctgaaaatccagatatgttgaagaaacttctcagtacccaagtgccagcatcatttagttccctctataattcttacgtggaatcagaaatccttattaatgcccttactctatttgagattatctatgacaatctcagagcagaagtgtttaactatagagaattcaataaaggttcccttttttacttatgcactacatctggagtgtgtgttaagaaaattagagccttagcaaatcaccatgacctcttagtgaaagtgaaagttataaaactagtgaacaaattctgattggttatgtaccgtcaaaagacttgaagaaatttcatgattttgcagtgtggaagcgttgaaaattgaaagttactgcttttccacttgctcatatagtaaagggatcctttcagctgccagtgttgaataatgtatcatccagagtgatgttatctgtgacagtcaccagctttaagctgaaccattttatgaataccaaataaatagacctcttgtactgaaaacatatttgtgactttaatcgtgctgcttggatagaaatatttttactggttcttctgaattgacagtaaacctgtccattatgaatggcctactgttctattatttgttttgacttgaatttatccaccaaagacttcatttgtgtatcatcaataaagttgtatgtttcaactgacaaaaaaaaaaaaaaaa

SEQ ID NO: 47 - DNA, 2773 bp, Homo sapiens
caagctctggtaggcaagtgcatgcagtgtgcctaaaacctgccagcagtacttttgagtttttttttttgttttgttttactttagcatttattattcatggattgaagaaatcaaaatggctgaagataaagagacaaagcatggaggacacaagaatgggaggaaaggcggactctcaggaacttcattcttcacgtggtttatggtgattgcattgctgggcgtctggacatctgtagctgtcgtttggtttgatcttgttgactatgaggaagttctagccaaagcaaaggacttccgttataacttatcagaggtgcttcaaggaaaactaggaatctatgatgctgatggtgatggagattttgatgtggatgatgccaaagttttattaggacttaaagagagatctacttcagagccagcagtcccgccagaagaggctgagccacacactgagcccgaggagcaggttcctgtggaggcagaaccccagaatatcgaagatgaagcaaaagaacaaattcagtcccttctccatgaaatggtacacgcagaacatgttgagggagaagacttgcaacaagaagatggacccacaggagaaccacaacaagaggatgatgagtttcttatggcgactgatgtagatgatagatttgagaccctggaacctgaagtatctcatgaagaaaccgagcatagttaccacgtggaagagacagtttcacaagactgtaatcaggatatggaagagatgatgtctgagcaggaaaatccagattccagtgaaccagtagtagaagatgaaagattgcaccatgatacagatgatgtaacataccaagtctatgaggaacaagcagtatatgaacctctagaaaatgaagggatagaaatcacagaagtaactgctccccctgaggataatcctgtagaagattcacaggtaattgtagaagaagtaagcatttttcctgtggaagaacagcaggaagtaccaccagatacttaaagcttcaaaaagactgcccctaccaccacaggaggaccagcctaaccatacgctccaaaagatggctgtgatagatcttgtgaagcaattactgagcagatcaagatctttgggaaggaacactaaagatgttttgaatgaattatagtccactggcattttagtgtatttttttttctttttagaaacacacatttctaaaaatgtcatgttacattcctgcatgtcccttttgatagcattagtggatccattggatttcttttttctttttgtgagacagcttttagtcttacctgaatttatgtgtgtttttccgacagtggttaataattatattggtgatgtagcagcaattgtgttggcagggttttcatatattattagtaattaacactaactgttggactgacttgtgtacactgtgttaaacatgatttaaaagctattaagagtactttgtgttagcactcttaaaaacgctaacagagatcatcattagctgtgaagatttgagttgtatatacctgcactgatattcttatcaaaaatttctacattagctttaagtgttcagattaacacttttgaaatttttgtagcttttagctgattaattagaaaaatttaatatttcagtgaaagttttaaattatcatttatttatttttttaaatgagaggggaaagctgaaattccttgttaagacacaaggaaaaagaatggccctactattatcatgcaaaaatgctttgttggcacctcagattaatcatataatagctatagtctcttcagcatttgtttaaattttagaaaacctgtataaattactggtgcataacttaaagattattctgcctttggctaattgagtaattcccctccagcactagagaccgctcagtgctcttactagatgaactcagtaacgccttgagctgggttgattgaggatgtgtgaaaagctcacagagcccgatgcctgctgctatttcacggcaatgagcctttttctttctacactgaagattttcttcttatttaatgtggtttattttgggctcagaaataattgctctgttgaaaataatcctttgtcagaaaagaaggtagctaccacatcattttgaaaggaccatgagcaactataagcaaagccataagaagtggtttgatcgatatattaggggtagctcttgattttgttaacattaagataaggtgactttttccccctgcttttaggattaaaatcaaagatacttctatatttttatcactatagatcatagttattatacaatgtagtgagtcctgcatgggtactcgatgtgtaatgaaacctgaaataataagataataagaaaagcaataattttctaaagctgtgctgtcggtgatacagagatgatactcaaattataataaaactcttcattttgtgaattatagaagctactttttataaagccatatttttttagggaaactaaggagtgacatagaactgatgaatgagtaaaagtaagttttgctggatttttgtagaactctggacgttgaggattcattatgctgtggttaactttaaatatttttgaattccaaatatctgaattaatgagccttgtctttacaaatatgtgccattgtgcaacatcggtggattttctaaaaataatgtaaatgtcttctattaaatgttgagtgcaataaaatacagaagaattctctaaaaaaaaaaaaaaaaaa

SEQ ID NO: 48 - DNA, 1931 bp, Homo sapiens
ggctcgggctccggctcgggctcccgcggcgtgggctgggcagcagccgggcggcggctccgcggcgccgggcaggggccgtccgcgggtccgcgccctcgggcggcggcgtctcctgggtcccggcagccgtccgcgcgcccgggcgcaggtttggttttcctaaacaaatcctttcacagggaccgacggcacttgataatgtgacaaaaaccagcctcttccaccccactgcagtgacttttgccggaaagtggagcagtgggcacggccaaccttgtcgttcatcaatgccgcccctggcagtatctgaggatcggtggcagccatgcctccccctgccccagccgctccttcccccccacgctaatctgcatggtgtgggcgcccttgggacccccgaggactgattgtctgaccttgcttcacacgcccagtaaggactcccccaagatgtcgctcgagtggctggtggcctggagctggtcgctggatggcctgagggactgcatcgccaccggcatccagtccgtgcgggactgcgacaccaccgctgtcatcactgtggcctgcctcctggtcctcttcgtgtggtactgttatcacgtgggcagggagcagccccggccctacgtctccgtcaactccctcatgcaggctgccgatgccaacgggctgcagaatggctacgtgtactgccagtcccctgagtgcgtgcgctgcacccacaacgagggcctcaaccagaagctgtaccacaacctgcaggagtacgccaagcgctactcctggtccggcatgggccgcatccacaagggcatccgcgagcagggccggtacctcaacagccggccctccatccagaagcccgaggtcttcttcctgcccgacctgcccaccacgccctatttctcccgggacgcacagaaacatgatgtggaagtgctggaacggaacttccagaccatcctgtgtgagtttgagaccctctacaaagctttctcaaactgcagcctcccgcaaggatggaaaatgaacagcacccccagcggggagtggttcaccttttacttggtcaatcagggggtttgtgttcccaggaactgtaggaagtgcccacggacgtaccgcttgctcggaagccttcggacctgtattgggaacaatgtttttgggaacgcgtgcatctctgtgctgagccctgggactgtgataacggagcactatggacccaccaacatccgcatccgatgccatttaggtctgaaaactccaaatggctgtgagctggtggtggggggagagccccagtgctgggcagaagggcgctgccttctctttgatgactctttcctgcatgctgcgttccatgaaggttcagcagaggatggcccacgggtggttttcatggtggatttgtggcatccaaacgtcgcagcggccgaacggcaggctcttgatttcatctttgctccgggacgatgagagtatttcccatgctggagtcggcgagaagggccgaggcggggcctgggcagactgtggtccggtccagtccctaccggtgttgtttccatgctcagaaacctgcctcagcggaaagctcttatttgggattttatatcatgtcgggtccctctttcccttggttattgtaaatggaaacttttcggcttgtatttccttagattttttttttttccttccaatcatttgcttcagagactcctttctggcctaacagcgcattcctttgattggtccttgagtgaccagagacttagtgcccttgtaagtctgtcttctgttgctacttgtttttttcagtgctctgaaatagagtaactaaatggttatttgtctgaatataataatgtaaaacttaaaaaaaaaaaaaaaaaaaaaaaaaaaaaaaaaaaaaaaaaaaaaaa

SEQ ID NO: 49 - DNA, 3514 bp, Homo sapiens
atgctgctgctaggggtggtgggagcagccgtgggacgcgtggccgggagcgggggtgacagcctgggattccgggggcttctcttccttgtcctcctcctctcctctctattcccagtgtggccgtggctgacactaaagactttgtagccatcaacccgagtgcagtttcgatggaaaatgaaggttgcacgttttcaaaaaatacctaatggtgaaaatgagacaatgattcctgtattgacatcaaaaaaagcaagtgaattaccagtcagtgaagttgcaagcattctccaagctgatcttcagaatggtctaaacaaatgtgaagttagtcataggcgagcctttcatggctggaatgagtttgatattagtgaagatgagccactgtggaagaagtatatttctcagtttaaaaatccccttattatgctgcttctggcttctgcagtcatcagtgttttaatgcatcagtttgatgatgccgtcagtatcactgtggcaatacttatcgttgttacagttgcctttgttcaggaatatcgttcagaaaaatctcttgaagaattgagtaaacttgtgccaccagaatgccattgtgtgcgtgaaggaaaattggagcatacacttgcccgagacttggttccaggtgatacagtttgcctttctgttggggatagagttcctgctgacttacgcttgtttgaggctgtggatctttccattgatgagtccagcttgacaggtgagacaacgccttgttctaaggtgacagctcctcagccagctgcaactaatggagatcttgcatcgagaagtaacattgcctttatgggaacactggtcagatgtggcaaagcaaagggtgttgtcattggaacaggagaaaattctgaatttggggaggtttttaaaatgatgcaagcagaagaggcaccaaaaacccctctgcagaagagcatggacctcttaggaaaacaactttccttttactcctttggtataataggaatcatcatgttggttggctggttactgggaaaagatatcctggaaatgtttactattagtgtaagtttggctgtagcagcaattcctgaaggtctccccattgtggtcacagtgacgctagctcttggtgttatgagaatggtgaagaaaagggccattgtgaaaaagctgcctattgttgaaactctgggctgctgtaatgtgatttgttcagataaaactggaacactgacgaagaatgaaatgactgttactcacatatttacttcagatggtctgcatgctgaggttactggagttggctataatcaatttggggaagtgattgttgatggtgatgttgttcatggattctataacccagctgttagcagaattgttgaggcgggctgtgtgtgcaatgatgctgtaattagaaacaatactctaatggggaagccaacagaaggggccttaattgctcttgcaatgaagatgggtcttgatggacttcaacaagactacatcagaaaagctgaatacccttttagctctgagcaaaagtggatggctgttaagtgtgtacaccgaacacagcaggacagaccagagatttgttttatgaaaggtgcttacgaacaagtaattaagtactgtactacataccagagcaaagggcagaccttgacacttactcagcagcagagagatgtgtaccaacaagagaaggcacgcatgggctcagcgggactcagagttcttgctttggcttctggtcctgaactgggacagctgacatttcttggcttggtgggaatcattgatccacctagaactggtgtgaaagaagctgttacaacactcattgcctcaggagtatcaataaaaatgattactggagattcacaggagactgcagttgcaatcgccagtcgtctgggattgtattccaaaacttcccagtcagtctcaggagaagaaatagatgcaatggatgttcagcagctttcacaaatagtaccaaaggttgcagtattttacagagctagcccaaggcacaagatgaaaattattaagtcgctacagaagaacggttcagttgtagccatgacaggagatggagtaaatgatgcagttgctctgaaggctgcagacattggagttgcgatgggccagactggtacagatgtttgcaaagaggcagcagacatgatcctagtggatgatgattttcaaaccataatgtctgcaatcgaagagggtaaagggatttataataacattaaaaatttcgttagattccagctgagcacgagtatagcagcattaactttaatctcattggctacattaatgaactttcctaatcctctcaatgccatgcagattttgtggatcaatattattatggatggacccccagctcagagccttggagtagaaccagtggataaagatgtcattcgtaaacctcctcgcaactggaaagacagcattttgactaaaaacttgatacttaaaatacttgtttcatcaataatcattgtttgtgggactttgtttgtcttctggcgtgagctacgagacaatgtgattacacctcgagacacaacaatgaccttcacatgctttgtgttttttgacatgttcaatgcactaagttccagatcccagaccaagtctgtgtttgagattggactctgcagtaatagaatgttttgctatgcagttcttggatccatcatgggacaattactagttatttactttcctccgcttcagaaggtttttcagactgagagcctaagcatactggatctgttgtttcttttgggtctcacctcatcagtgtgcatagtggcagaaattataaagaaggttgaaaggagcagggaaaagatccagaagcatgttagttcgacatcatcatcttttcttgaagtctggctctgggagaggagtggacagcagctggttgagatacatccccatctggagacaggactgccactgacagaagatgtgagctgtgtctaagtccagtcttgtgcccagccgtgtctgcgccttcactctttggaactctgcatacaacatcttagcaccatcttcctgcagctcttccttacctaaataaagaaacagcccaagggcagtatttctaaaagcactgtaacagcttttcattttctccacatatactacaaattctataaagaaagaaattaatttaaaaaaactaagatgtttttctcttctggcttcataaatgccttgctgtataaattgaaatattgatactgaactgtctttttaatgatgacctaactttattcaacccatcggaatttactttttccctgaaataagatcttttccactggtctactacctgaccataaacatgtctgcatttgaattctctaaaccctaaatctgtgtctatgaaaaatacaaatgactattaaatattattctctttactgttctctttcaccgaaaaaaaaaaaaaaaaaaaaaa

SEQ ID NO: 50 - DNA, 3389 bp, Homo sapiens
atgctgctgctaggggtggtgggagcagccgtgggacgcgtggccgggagcgggggtgacagcctgggattccgggggcttctcttccttgtcctcctcctctcctctctattcccagtgtggccgtggctgacactaaagactttgtagccatcaacccgagtgcagtttcgatggaaaatgaaggttgcacgttttcaaaaaatacctaatggtgaaaatgagacaatgattcctgtattgacatcaaaaaaagcaagtgaattaccagtcagtgaagttgcaagcattctccaagctgatcttcagaatggtctaaacaaatgtgaagttagtcataggcgagcctttcatggctggaatgagtttgatattagtgaagatgagccactgtggaagaagtatatttctcagtttaaaaatccccttattatgctgcttctggcttctgcagtcatcagtgttttaatgcatcagtttgatgatgccgtcagtatcactgtggcaatacttatcgttgttacagttgcctttgttcaggaatatcgttcagaaaaatctcttgaagaattgagtaaacttgtgccaccagaatgccattgtgtgcgtgaaggaaaattggagcatacacttgcccgagacttggttccaggtgatacagtttgcctttctgttggggatagagttcctgctgacttacgcttgtttgaggctgtggatctttccattgatgagtccagcttgacaggtgagacaacgccttgttctaaggtgacagctcctcagccagctgcaactaatggagatcttgcatcgagaagtaacattgcctttatgggaacactggtcagatgtggcaaagcaaagggtgttgtcattggaacaggagaaaattctgaatttggggaggtttttaaaatgatgcaagcagaagaggcaccaaaaacccctctgcagaagagcatggacctcttaggaaaacaactttccttttactcctttggtataataggaatcatcatgttggttggctggttactgggaaaagatatcctggaaatgtttactattagtgtaagtttggctgtagcagcaattcctgaaggtctccccattgtggtcacagtgacgctagctcttggtgttatgagaatggtgaagaaaagggccattgtgaaaaagctgcctattgttgaaactctgggctgctgtaatgtgatttgttcagataaaactggaacactgacgaagaatgaaatgactgttactcacatatttacttcagatggtctgcatgctgaggttactggagttggctataatcaatttggggaagtgattgttgatggtgatgttgttcatggattctataacccagctgttagcagaattgttgaggcgggctgtgtgtgcaatgatgctgtaattagaaacaatactctaatggggaagccaacagaaggggccttaattgctcttgcaatgaagatgggtcttgatggacttcaacaagactacatcagaaaagctgaatacccttttagctctgagcaaaagtggatggctgttaagtgtgtacaccgaacacagcaggacagaccagagatttgttttatgaaaggtgcttacgaacaagtaattaagtactgtactacataccagagcaaagggcagaccttgacacttactcagcagcagagagatgtgtaccaacaagagaaggcacgcatgggctcagcgggactcagagttcttgctttggcttctggtcctgaactgggacagctgacatttcttggcttggtgggaatcattgatccacctagaactggtgtgaaagaagctgttacaacactcattgcctcaggagtatcaataaaaatgattactggagattcacaggagactgcagttgcaatcgccagtcgtctgggattgtattccaaaacttcccagtcagtctcaggagaagaaatagatgcaatggatgttcagcagctttcacaaatagtaccaaaggttgcagtattttacagagctagcccaaggcacaagatgaaaattattaagtcgctacagaagaacggttcagttgtagccatgacaggagatggagtaaatgatgcagttgctctgaaggctgcagacattggagttgcgatgggccagactggtacagatgtttgcaaagaggcagcagacatgatcctagtggatgatgattttcaaaccataatgtctgcaatcgaagagggtaaagggatttataataacattaaaaatttcgttagattccagctgagcacgagtatagcagcattaactttaatctcattggctacattaatgaactttcctaatcctctcaatgccatgcagattttgtggatcaatattattatggatggacccccagctcagagccttggagtagaaccagtggataaagatgtcattcgtaaacctcctcgcaactggaaagacagcattttgactaaaaacttgatacttaaaatacttgtttcatcaataatcattgtttgtgggactttgtttgtcttctggcgtgagctacgagacaatgtgattacacctcgagacacaacaatgaccttcacatgctttgtgttttttgacatgttcaatgcactaagttccagatcccagaccaagtctgtgtttgagattggactctgcagtaatagaatgttttgctatgcagttcttggatccatcatgggacaattactagttatttactttcctccgcttcagaaggtttttcagactgagagcctaagcatactgggtctggctctgggagaggagtggacagcagctggttgagatacatccccatctggagacaggactgccactgacagaagatgtgagctgtgtctaagtccagtcttgtgcccagccgtgtctgcgccttcactctttggaactctgcatacaacatcttagcaccatcttcctgcagctcttccttacctaaataaagaaacagcccaagggcagtatttctaaaagcactgtaacagcttttcattttctccacatatactacaaattctataaagaaagaaattaatttaaaaaaactaagatgtttttctcttctggcttcataaatgccttgctgtataaattgaaatattgatactgaactgtctttttaatgatgacctaactttattcaacccatcggaatttactttttccctgaaataagatcttttccactggtctactacctgaccataaacatgtctgcatttgaattctctaaaccctaaatctgtgtctatgaaaaatacaaatgactattaaatattattctctttactgttctctttcaccgaaaaaaaaaaaaaaaaaaaaaa

SEQ ID NO: 51 - DNA, 3484 bp, Homo sapiens
atgctgctgctaggggtggtgggagcagccgtgggacgcgtggccgggagcgggggtgacagcctgggattccgggggcttctcttccttgtcctcctcctctcctctctattcccagtgtggccgtggctgacactaaagactttgtagccatcaacccgagtgcagtttcgatggaaaatgaaggttgcacgttttcaaaaaatacctaatggtgaaaatgagacaatgattcctgtattgacatcaaaaaaagcaagtgaattaccagtcagtgaagttgcaagcattctccaagctgatcttcagaatggtctaaacaaatgtgaagttagtcataggcgagcctttcatggctggaatgagtttgatattagtgaagatgagccactgtggaagaagtatatttctcagtttaaaaatccccttattatgctgcttctggcttctgcagtcatcagtgttttaatgcatcagtttgatgatgccgtcagtatcactgtggcaatacttatcgttgttacagttgcctttgttcaggaatatcgttcagaaaaatctcttgaagaattgagtaaacttgtgccaccagaatgccattgtgtgcgtgaaggaaaattggagcatacacttgcccgagacttggttccaggtgatacagtttgcctttctgttggggatagagttcctgctgacttacgcttgtttgaggctgtggatctttccattgatgagtccagcttgacaggtgagacaacgccttgttctaaggtgacagctcctcagccagctgcaactaatggagatcttgcatcgagaagtaacattgcctttatgggaacactggtcagatgtggcaaagcaaagggtgttgtcattggaacaggagaaaattctgaatttggggaggtttttaaaatgatgcaagcagaagaggcaccaaaaacccctctgcagaagagcatggacctcttaggaaaacaactttccttttactcctttggtataataggaatcatcatgttggttggctggttactgggaaaagatatcctggaaatgtttactattagtgtaagtttggctgtagcagcaattcctgaaggtctccccattgtggtcacagtgacgctagctcttggtgttatgagaatggtgaagaaaagggccattgtgaaaaagctgcctattgttgaaactctgggctgctgtaatgtgatttgttcagataaaactggaacactgacgaagaatgaaatgactgttactcacatatttacttcagatggtctgcatgctgaggttactggagttggctataatcaatttggggaagtgattgttgatggtgatgttgttcatggattctataacccagctgttagcagaattgttgaggcgggctgtgtgtgcaatgatgctgtaattagaaacaatactctaatggggaagccaacagaaggggccttaattgctcttgcaatgaagatgggtcttgatggacttcaacaagactacatcagaaaagctgaatacccttttagctctgagcaaaagtggatggctgttaagtgtgtacaccgaacacagcaggacagaccagagatttgttttatgaaaggtgcttacgaacaagtaattaagtactgtactacataccagagcaaagggcagaccttgacacttactcagcagcagagagatgtgtaccaacaagagaaggcacgcatgggctcagcgggactcagagttcttgctttggcttctggtcctgaactgggacagctgacatttcttggcttggtgggaatcattgatccacctagaactggtgtgaaagaagctgttacaacactcattgcctcaggagtatcaataaaaatgattactggagattcacaggagactgcagttgcaatcgccagtcgtctgggattgtattccaaaacttcccagtcagtctcaggagaagaaatagatgcaatggatgttcagcagctttcacaaatagtaccaaaggttgcagtattttacagagctagcccaaggcacaagatgaaaattattaagtcgctacagaagaacggttcagttgtagccatgacaggagatggagtaaatgatgcagttgctctgaaggctgcagacattggagttgcgatgggccagactggtacagatgtttgcaaagaggcagcagacatgatcctagtggatgatgattttcaaaccataatgtctgcaatcgaagagggtaaagggatttataataacattaaaaatttcgttagattccagctgagcacgagtatagcagcattaactttaatctcattggctacattaatgaactttcctaatcctctcaatgccatgcagattttgtggatcaatattattatggatggacccccagctcagagccttggagtagaaccagtggataaagatgtcattcgtaaacctcctcgcaactggaaagacagcattttgactaaaaacttgatacttaaaatacttgtttcatcaataatcattgtttgtgggactttgtttgtcttctggcgtgagctacgagacaatgtgattacacctcgagacacaacaatgaccttcacatgctttgtgttttttgacatgttcaatgcactaagttccagatcccagaccaagtctgtgtttgagattggactctgcagtaatagaatgttttgctatgcagttcttggatccatcatgggacaattactagttatttactttcctccgcttcagaaggtttttcagactgagagcctaagcatactggatctgttgtttcttttgggtctcacctcatcagtgtgcatagtggcagaaattataaagaaggttgaaaggagcagggaaaagatccagaagcatgtctggctctgggagaggagtggacagcagctggttgagatacatccccatctggagacaggactgccactgacagaagatgtgagctgtgtctaagtccagtcttgtgcccagccgtgtctgcgccttcactctttggaactctgcatacaacatcttagcaccatcttcctgcagctcttccttacctaaataaagaaacagcccaagggcagtatttctaaaagcactgtaacagcttttcattttctccacatatactacaaattctataaagaaagaaattaatttaaaaaaactaagatgtttttctcttctggcttcataaatgccttgctgtataaattgaaatattgatactgaactgtctttttaatgatgacctaactttattcaacccatcggaatttactttttccctgaaataagatcttttccactggtctactacctgaccataaacatgtctgcatttgaattctctaaaccctaaatctgtgtctatgaaaaatacaaatgactattaaatattattctctttactgttctctttcaccgaaaaaaaaaaaaaaaaaaaaaa

SEQ ID NO: 52 - DNA, 2711 bp, Homo sapiens
gatgtttcagtcctggaaagacaagcatcatgcctctgaccagtgccttcagggctgtggacaacgaccctgggatcattgtctggagaatagagaaaatggagctggcgctggtgcctgtgagcgcccacggcaacttctatgagggggactgctacgtcatcctctcgacccggagagtggccagtctcctatcccaggacatccacttctggatcgggaaggactcctcccaggatgagcaaagctgcgcagccatatataccacacagctggacgactacctgggaggcagccctgtgcagcaccgagaggtccagtaccatgagtcagacactttccgtggctacttcaagcagggcatcatctacaagcaggggggtgtcgcctctgggatgaagcacgtggagaccaatacctacgacgtgaagcggctgctacatgtgaaagggaaaagaaacatcagggctaccgaggtggaaatgagctgggacagtttcaaccgaggtgatgtcttcttgctggaccttgggaaagtcatcatccaatggaatggcccagagagcaacagtggggagcgcctgaaggctatgcttctggcaaaggatattcgagacagggagcgagggggccgtgctgaaataggagtgatcgagggagacaaggaggcagccagcccagagctgatgaaggtccttcaggacacccttggccgacgctccattatcaagcctacagtccctgatgagatcatagatcagaagcagaaatcaactatcatgttgtatcatatctcagattcagctgggcagctggcagtcacagaggtagcaacaaggcctctggtccaggacttactgaaccatgatgactgctacatcctggaccaaagtggaaccaaaatctacgtgtggaaaggaaaaggagccacaaaggctgaaaaacaggcagccatgtctaaagcgctgggcttcatcaagatgaagagctaccccagcagcaccaatgtggagaccgtcaacgatggtgctgagtcggccatgttcaagcagctgttccagaagtggtcagtaaaggaccagaccatgggcctggggaaaacgttcagcattggtaaaattgctaaagttttccaggataaatttgatgtgactctgctacacaccaagccagaggtagctgcccaggaaagaatggtcgatgatggcaacggaaaagttgaggtctggagaattgagaacctggagctggtccctgtggagtatcaatggtatggcttcttttatgggggagactgttatctggtcctctacacatacgaggtaaatgggaagccacatcacatcttgtacatctggcagggccgccacgcctcacaggatgagctggcagcctcagcataccaggcagtggaggtggatcggcagtttgatggggctgctgtgcaggttcgagtcaggatgggaacggagccacgccacttcatggccatcttcaaagggaagctagttatctttgagggtgggacttccaggaagggaaatgccgagcctgaccctccagtaagactcttccaaattcatggaaatgacaaatctaacaccaaagcagtggaagttccagcctttgcctcctccctaaactccaatgatgtctttctgctgcgaactcaggcagagcactacctgtggtatggcaaggggtctagtggggatgagcgggcaatggctaaggagctggccagccttctctgtgatggcagcgagaacactgtggccgagggccaggagccagccgagttctgggacctactgggagggaaaactccctatgccaatgataaaagacttcagcaggaaatcctagatgtccagtctcgtctctttgaatgttccaataagaccggccaattcgttgtcactgagatcacagacttcacccaggatgacctgaaccctactgacgtgatgctcctagatacctgggaccaggtgttcttgtggattggggctgaggccaatgccacggagaaggagagtgcccttgccacagcacagcagtacctgcacactcaccccagcggccgagatcccgacacaccaatcctgatcattaagcaggggtttgagcctcccatcttcacaggctggttcctagcctgggaccctaacatttggagtgcaggaaaaacatatgaacaattaaaagaagagctgggagatgctgctgctatcatgcgaatcactgctgacatgaagaatgcaaccctctccctgaattctaatgacagtgagccaaaatattaccctatagcagttctgttgaaaaaccagaatcaggagctgcctgaggatgtaaaccctgccaaaaaggagaattacctctctgaacaggactttgtgtctgtgtttggcatcacaagagggcaatttgcagctctgcctggctggaaacagctccaaatgaagaaagaaaaggggcttttctaaagcaagaaggcctatacctattgcaaggccacagaaaagagcagatagtgccaatatcaggaaataatttatccaccaatttctgcctgacattcagctacttaatttagatataatagagtctgcaaatcacggcatgttctccattttttctcatccttgcattccttgcttgttatatacctaaaatgttaaccatatagtttttgggttttgtggccc

SEQ ID NO: 53 - DNA, 3994 bp, Homo sapiens
gcccgctccagccgccgcgcatcctcggcccgcgccccgagacccgcgcccagctagccccggccccgctcggcgccccaggcagctcggctgcgctcgccgcgggacggcgcggccatgaggctgcggggatgcggaccccgggccgcccctgcctccagcgcaggggccagcgacgctcggctgctggcgcccccggggcggaaccccttcgtgcacgagctgcgcctcagcgccctgcagaaggcccaggtggccctcatgacactgacgctcttcccggtccggctcctggttgccgctgccatgatgctgctggcctggcccctcgcacttgtcgcatccctgggctctgcggagaaggaacccgagcagcccccggccctgtggaggaaggttgtggacttcctgctgaaggccatcatgcgcaccatgtggttcgccggcggcttccaccgggtggccgtgaaggggcggcaggcgctgcccaccgaggcggccatcctcacgctcgcgcctcactcgtcctacttcgacgccatccctgtgaccatgacgatgtcctccatcgtgatgaaggcagagagcagagacatcccgatctggggaactctgatccagtatatacggcctgtgttcgtgtcccggtcagaccaggattctcgcaggaaaacagtagaagaaatcaagagacgggcgcagtccaacggaaagtggccacagataatgatttttccagaaggaacttgtacaaacaggacctgcctaattaccttcaaacctggtgcattcatccctggagcgcccgtccagcctgtggttttacgatatccaaataaactggacaccatcacatggacgtggcaaggacctggagcgctggaaatcctgtggctcacgctgtgtcagtttcacaaccaagtggaaatcgagttccttcctgtgtacagcccttctgaggaggagaagaggaaccccgcgctgtatgccagcaacgtgcggcgagtcatggccgaggccttgggtgtctccgtgactgactacacgttcgaggactgccagctggccctggcggaaggacagctccgtctccccgctgacacttgccttttagaatttgccaggctcgtgcggggcctcgggctaaaaccagaaaagcttgaaaaagatctggacagatactcagaaagagccaggatgaagggaggagagaagataggtattgcggagtttgccgcctccctggaagtccccgtttctgacttgctggaagacatgttttcactgttcgacgagagcggcagcggcgaggtggacctgcgagagtgtgtggttgccctgtctgtcgtctgccggccggcccggaccctggacaccatccagctggctttcaagatgtacggagcgcaagaggacggcagcgtcggcgaaggtgacctgtcctgcatcctcaagacggccctgggggtggcagagctcaccgtgaccgacctattccgagccattgaccaagaggagaaggggaagatcacattcgctgacttccacaggtttgcagaaatgtaccctgccttcgcagaggaatacctgtacccggatcagacacatttcgaaagctgtgcagagacctcacctgcgccaatcccaaacggcttctgtgccgatttcagcccggaaaactcagacgctgggcggaagcctgttcgcaagaagctggattaggacccagggttgcggagagacgcggcccctcccgcgtggacatcaccgccatgagcctctttgcgagtgacctctgggctccgctcctcactcctgctgtacaggcactgtcttcagcccgagttccaggggcctcgggggctgtttgtatcttgttcctttgtgaagtgtgttgcagaaccgacgcttactgtgcgagaatcggagggcgcgcacgcggatcccccgcctggcctggaccccgtggggtcaggttccctgccgggcggggggcaccggtgccgccccgtgttctcccacggggccctggtttcgagtctctgtcacagcctcttccggcggcagcgtgcaccgggcgggcctccgtgcacactcagcacacgcctgccacacagcgtgcgcttgcgtgtcactctggcacgaaacctgtctgcctctgtggatccacagcctggcagagccgagccgtcacctgatttttcagtgtttctacctgtgtgctggagctcatgagtattttataaactccatttaggtacttcaggaaacatgcagcattttttaaaaaatgaaaattgtttttctacttcatttttccttttagagtcaaaggatatttatttataggcctttttttttttaatatagaatctgaggctgtttgggctttgacttaaatttccatcaggcctctctccagcaggtaatccctctccttccgctgggtcccctggggaggtgtgaactcaagggcctagccccaaaacactttttctgcttttcttaatccttttccagtcccctctttttttataaacgttggcagtttgatgtttctgtttcggcataacgtaatccatttcactgtagcctaaactccagtccgaggttggatattgttcaaatgagcagggcccgagctggaagcgcaaggcagccgccgccgtgccgctcctcccttgccctcaggccaggtccctgctggaagcggctgcatcttcctgtcagccctggtttccatggtgactggcgtcacgcagccacccgagtatggctgaccttcctgcagagagaggagccgcagtcttttgcttgtggaaggagacgctgggctgtgcggtgcggagggtgatgaggatgtctggtgacagccgtgcggacaccactcctctctgcagcactgcctcccagcgccagggtcgcgggcacatcccactgagagcgggggtcctgccccatcttagagtcaaaggcagaggggcttccaggccctggatggggtattttggtgtcacctgaagtccctctgacatcaccttgtttcatcattttttatgacagaattagaaacccatccttcaagcacaataatcatcacagacttgagtttgcttcctaaagcaaaggctccgggtttgtttggaaaatttttttgatttctgaaatgaattgatttttatatttggggcatctctatagaaagtgaccaccaaggccagtaagtacgggaaaaaatgtttactaacttcctcagagattcgtgatacgcgtttctccactgacagacatttaaaaacaaccttcagctccgtttcaatcaatcacctcgacttgttttttagcatggacactgccagcaggacagacagggatggagtaaaccgaagtcaatttcagggctcttggcgtgttggacacagaagaaatcctagtgcagcctttggtagctaacagtcactgattttataattggagaatgcgtaaagattcatttttcaaggagaagagcctgcaaatggccaatgaaggaggtaaataaactaagatattccgagggaagggacccaggccacctcccttccgcaggtctgcagatgaagggttttttgaatgaaatgccactgtgcattttcagaaaaaaaaatctctgataaacagactttgaatggatgtttgttcctcctgattctcttttctcttcgtggcgacttagagttggcggatattcggaactgtgaatgtacatagcgttgagttaaaccccttgtgtgtgagacaggacgcagcgggcccctggtggcctgggggccagacccgtgggcaggtggggcatgggccctggcctgcggggacctgctggggtgtgagggcagagggagggttgccatgaaggaacttgggattttcaatggaataagtaaaacataaagtctatacttgggaaaaaaaaaaaaaaaaaaaaaaaaaaaaaaaaaaaaaaaaaaaaaaaaaa

SEQ ID NO: 54 - DNA, 1792 bp, Homo sapiens
ataggtggctgcagaggcgaggtgacggcgcgtgcggaacgaactctgcacccccaggaatggggagcgctggcttttccgtgggaaaattccacgtggaggtggcctctcgcggccgggaatgtgtctcggggacgcccgagtgtgggaatcggctcgggagtgcgggcttcggggatctctgcttggaactcagaggcgctgacccagcctggggcccgtttgctgcccacgggaggagccgccgtcagggctcgagatttctgtggctcctcaagatattggtcataatcctggtacttggcattgttggatttatgttcggaagcatgttccttcaagcagtgttcagcagccccaagccagaactcccaagtcctgccccgggtgtccagaagctgaagcttctgcctgaggaacgtctcaggaacctcttttcctacgatggaatctggctgttcccgaaaaatcagtgcaaatgtgaagccaacaaagagcagggaggttacaactttcaggatgcctatggccagagcgacctcccagcggtgaaagcgaggagacaggctgaatttgaacactttcagaggagagaagggctgccccgcccactgcccctgctggtccagcccaacctcccctttgggtacccagtccacggagtggaggtgatgcccctgcacacggttcccatcccaggcctccagtttgaaggacccgatgcccccgtctatgaggtcaccctgacagcttctctggggacactgaacacccttgctgatgtcccagacagtgtggtgcagggcagaggccagaagcagctgatcatttctaccagtgaccggaagctgttgaagttcattcttcagcacgtgacatacaccagcacggggtaccagcaccagaaggtagacatagtgagtctggagtccaggtcctcagtggccaagtttccagtgaccatccgccatcctgtcatacccaagctatacgaccctggaccagagaggaagctcagaaacctggttaccattgctaccaagactttcctccgcccccacaagctcatgatcatgctccggagtattcgagagtattacccagacttgaccgtaatagtggctgatgacagccagaagcccctggaaattaaagacaaccacgtggagtattacactatgccctttgggaagggttggtttgctggtaggaacctggccatatctcaggtcaccaccaaatacgttctctgggtggacgatgattttctcttcaacgaggagaccaagattgaggtgctggtggatgtcctggagaaaacagaactggacgtggtaggcggcagtgtgctgggaaatgtgttccagtttaagttgttgctggaacagagtgagaatggggcctgccttcacaagaggatgggatttttccaacccctggatggcttccccagctgcgtggtgaccagtggcgtggtcaacttcttcctggcccacacggagcgactccaaagagttggctttgatccccgcctgcaacgagtggctcactcagaattcttcattgatgggctagggaccctactcgtggggtcatgcccagaagtgattataggtcaccagtctcggtctccagtggtggactcagaactggctgccctagagaagacctacaatacataccggtccaacaccctcacccgggtccagttcaagctggccctccactacttcaagaaccatctccaatgtgccgcataaaggtgtgagggcataggagaaacactaggctg

SEQ ID NO: 55 - DNA, 1556 bp, Homo sapiens
gcagccgcggtgtcgcgaagtcctcccgggttgcccccgcggcgtcagagggagggcgggcgccgcgttggtgacggcgaccctgcagcccaaggagcgctccactcgctgccgccggagggccggtgacctcttggctaccccgcgtcggaggcttagatggctcaggcgaagatcaacgctaaagccaacgaggggcgcttctgccgctcctcctccatggctgaccgctccagccgcctgctggagagcctggaccagctggagctcagggttgaagctttgagagaagcagcaactgctgttgagcaagagaaagaaatccttctggaaatgatccacagtatccaaaatagccaggacatgaggcagatcagtgacggagaaagagaagaattaaatctgactgcaaaccgtttgatgggaagaactctcaccgttgaagtgtcagtagaaacaattagaaacccccagcagcaagaatccctaaagcatgccacaaggattattgatgaggtggtcaataagtttctggatgatttgggaaatgccaagagtcatttaatgtcgctctacagtgcatgttcatctgaggtgccacatgggccagttgatcagaagtttcaatccatagtaattggctgtgctcttgaagatcagaagaaaattaagagaagattagagactctgcttagaaatattgaaaactctgacaaggccatcaagctattagagcattctaaaggagctggttccaaaactctgcaacaaaatgctgaaagcagattcaattagtcttcaaacctaagagcatttacacaatacacaaggtgtaaaaatgataaaatactattttaattgataactagttctttgttaggtataaccacttagttgacactgatagttgtttcagatgaggaaaatattccatcaagtatcttcagttttgtgaataacaaaactagcaatattttaattatctatctagagattttttagattgaattcttgtcttgtactaggatctagcatatttcactattctgtggatgaatacatagtttgtggggaaaacaaacgttcagctaggggcaaaaagcatgactgctttttcctgtctggcatggaatcacgcagtcaccttgggcatttagtttactagaaattctttactgaagcagcacacacatttactacacacacagtgttaacaaagcactgtgcttagagggtaaaaaggaatcacaaaacaagaatctttccaaagttgtctcattcagcaatgttaaggcatctgtatcaaattattttggatgtaaagattcctgtgtctcataatatgaatgtattttttgatatacaagaaactgacataaaatgtgagaaaaccacctataatttaccactgtgaacaattatatatctatctgcttcatcttttctcaaatgcatcaattctctaaaattcctatattgtaacttgcctttttttaaaaaagttagatgctgatataaagtctgcttaattgtcaacttaaaaaaaaaaaaaaaaa

SEQ ID NO: 56 - DNA, 2153 bp, Homo sapiens
caggcctccatctccaggtccctctccgaggcttcctcgctgccagctgagtcgtgggcacctgagggactacctaccactgctcccggctgtgccatcgccaccagctcccagcctcctgctcagacccgggacagcccctccatggcccccgagatggaccagttttacaggtccaccatggccatctacaagagcatcatggagcagtttaaccccgccctggagaacctggtgtacctgggcaacaactacctgcgtgccttccacgctctgtccgaggcggccgaggtctacttcagtgccatccagaagattggggagcgtgccctgcagagccccacctcacagattctgggggagatcttggtgcagatgtctgacacccagcggcacttgaactctgacctggaggtggtggtgcagacattccatggaggcctgctgcagcacatggagaagaacaccaagctggacatgcagttcatcaaagacagccgccagcactatgagctcgagtaccgccaccgagcggccaacctggagaagtgcatgtctgagctgtggcgcatggagcgcaagagagacaagaacgtgcgggagatgaaggagagtgtgaaccggctgcacgcacagatgcaggccttcgtgtctgagagtcagcgggcggctgaattggaagagaagcggcgctatcgcttcctagcagagaagcacctgctactttccaacaccttcctgcagttcttcggccgggcccgggggatgctccagaaccgcgtgctgctgtggaaggagcagtctgaggccagccgcagcccgtcgcgcgcccactcccccggcctgctgggccccgcgctggggccgccctacccctcgggccgcctgacgcccacctgcctggacatgcccccgaggcccctgggagagttcagctccccccgcagccggcacggctccggctcctacggcaccgagcccgacgcgaggcccgcgtcccagctagagccagaccgtcgctccctgccccgcacgccgtcggcctcctcgctctacagcggcagcgcccaaagctcgcgctccaactcctttggcgagcgcccgggcggcggcgggggcgccaggagagtccgcgccctggtctcccactcggagggcgccaaccacacgctgctgcgcttctccgctggggacgtggtggaggtgttggtgcccgaggcccagaacggctggctctacggcaagctggagggctcgtccgcgagcggttggttccccgaggcgtacgtgaaggctctggaggaggggcccgtgaatcccatgacccccgtgacccccatgacctccatgacctccatgtcccccatgacacccatgaaccccgggaacgagctgccttccaggtcctacccactccggggcagccacagcctcgatgacctcctggaccggccgggcaactccatagcaccctcggagtactgggatggccagtcccgctcccgcaccccaagccgggtgccaagccgtgcccccagccctgcacctccacccttgcccagcagccgccgcagcagcatgggcagcacagcagttgccactgacgtcaagaaactgatgtcctcagagcagtacccaccacaggagctcttcccgaggggcacaaatccttttgccactgtcaagcttcgtcccaccatcaccaatgaccgctcagcacccctcatccgctgaggcggggtccgaggtcgtaccccacagtgcacctgcccaggggctgttcagagctggcaatggcagcgacagcagcaacagcagcagatccaagaagcgggtccctgagacggggggtggctgccctccccagaccaccccggcagcctgagcagctccaaagcactggcttggggtccgagaccttcaaagtaaagcaggcggaatggggggacaggacaatttctccccctccaggggctccaggactctccctggggggcccacctcttgccccctaacctctttcccccttttctgcccccgtggggaggagccccttgtacctgctccgtgcccaacacatgccctctctgtacatcttttgtaaatgatgagaaataaaggaagtggacgcaaagtgatgcggcaaaaaaaaa

SEQ ID NO: 57 - DNA, 3105 bp, Homo sapiens
caactgggggcgccccggacgaccatgagagataaggactgagggccaggaaggggaagcgagcccgccgagaggtggcggggactgctcacgccaagggccacagcggccgcgctccggcctcgctccgccgctccacgcctcgcgggatccgcgggggcagcccggccgggcggggatgccggggctggggcggagggcgcagtggctgtgctggtggtgggggctgctgtgcagctgctgcgggcccccgccgctgcggccgcccttgcccgctgccgcggccgccgccgccggggggcagctgctgggggacggcgggagccccggccgcacggagcagccgccgccgtcgccgcagtcctcctcgggcttcctgtaccggcggctcaagacgcaggagaagcgggagatgcagaaggagatcttgtcggtgctggggctcccgcaccggccccggcccctgcacggcctccaacagccgcagcccccggcgctccggcagcaggaggagcagcagcagcagcagcagctgcctcgcggagagccccctcccgggcgactgaagtccgcgcccctcttcatgctggatctgtacaacgccctgtccgccgacaacgacgaggacggggcgtcggagggggagaggcagcagtcctggccccacgaagcagccagctcgtcccagcgtcggcagccgcccccgggcgccgcgcacccgctcaaccgcaagagccttctggcccccggatctggcagcggcggcgcgtccccactgaccagcgcgcaggacagcgccttcctcaacgacgcggacatggtcatgagctttgtgaacctggtggagtacgacaaggagttctcccctcgtcagcgacaccacaaagagttcaagttcaacttatcccagattcctgagggtgaggtggtgacggctgcagaattccgcatctacaaggactgtgttatggggagttttaaaaaccaaacttttcttatcagcatttatcaagtcttacaggagcatcagcacagagactctgacctgtttttgttggacacccgtgtagtatgggcctcagaagaaggctggctggaatttgacatcacggccactagcaatctgtgggttgtgactccacagcataacatggggcttcagctgagcgtggtgacaagggatggagtccacgtccacccccgagccgcaggcctggtgggcagagacggcccttacgacaagcagcccttcatggtggctttcttcaaagtgagtgaggtgcacgtgcgcaccaccaggtcagcctccagccggcgccgacaacagagtcgtaatcgctctacccagtcccaggacgtggcgcgggtctccagtgcttcagattacaacagcagtgaattgaaaacagcctgcaggaagcatgagctgtatgtgagtttccaagacctgggatggcaggactggatcattgcacccaagggctatgctgccaattactgtgatggagaatgctccttcccactcaacgcacacatgaatgcaaccaaccacgcgattgtgcagaccttggttcaccttatgaaccccgagtatgtccccaaaccgtgctgtgcgccaactaagctaaatgccatctcggttctttactttgatgacaactccaatgtcattctgaaaaaatacaggaatatggttgtaagagcttgtggatgccactaactcgaaaccagatgctggggacacacattctgccttggattcctagattacatctgccttaaaaaaacacggaagcacagttggaggtgggacgatgagactttgaaactatctcatgccagtgccttattacccaggaagattttaaaggacctcattaataatttgctcacttggtaaatgacgtgagtagttgttggtctgtagcaagctgagtttggatgtctgtagcataaggtctggtaactgcagaaacataaccgtgaagctcttcctaccctcctcccccaaaaacccaccaaaattagttttagctgtagatcaagctatttggggtgtttgttagtaaatagggaaaataatctcaaaggagttaaatgtattcttggctaaaggatcagctggttcagtactgtctatcaaaggtagattttacagagaacagaaatcggggaagtggggggaacgcctctgttcagttcattcccagaagtccacaggacgcacagcccaggccacagccagggctccacggggcgcccttgtctcagtcattgctgttgtatgttcgtgctggagttttgttggtgtgaaaatacacttatttcagccaaaacataccatttctacacctcaatcctccatttgctgtactctttgctagtaccaaaagtagactgattacactgaggtgaggctacaaggggtgtgtaaccgtgtaacacgtgaaggcaatgctcacctcttctttaccagaacggttctttgaccagcacattaacttctggactgccggctctagtaccttttcagtaaagtggttctctgcctttttactatacagcataccacgccacagggttagaaccaacgaagaaaataaaatgagggtgcccagcttataagaatggtgttagggggatgagcatgctgtttatgaacggaaatcatgatttcccttgtagaaagtgaggctcagattaaattttagaatattttctaaatgtctttttcacaatcatgtactgggaaggcaatttcatactaaactgattaaataatacatttataatctacaactgtttgcacttacagctttttttgtaaatataaactataatttattgtctattttatatctgttttgctgtaacattgaaggaaagaccagacttttaaaaaaaaagagtttatttagaaagtatcatagtgtaaacaaacaaattgtaccactttgattttcttggaatacaagactcgtgatgcaaagctgaagttgtgtgtacaagactcttgacagttgtgcttctctaggaggttgggtttttttaaaaaaagaattatctgtgaaccatacgtgattaataaagatttcctttaaggca

SEQ ID NO: 58 - DNA, 1535 bp, Homo sapiens
cctccgctcagtccgggagcgcacgtgggccgcggcgctccgacctccgctttcccaccgcccgcagctgaagcacatcccgcagcccggcgcggactccgatcgccgcagttgccctctggcgccatgtcgcagaacggagcgcccgggatgcaggaggagagcctgcagggctcctgggtagaactgcacttcagcaataatgggaacgggggcagcgttccagcctcggtttctatttataatggagacatggaaaaaatactgctggacgcacagcatgagtctggacggagtagctccaagagctctcactgtgacagcccacctcgctcgcagacaccacaagataccaacagggcttctgaaacagatacccatagcattggagagaaaaacagctcacagtctgaggaagatgatattgaaagaaggaaagaagttgaaagcatcttgaagaaaaactcagattggatatgggattggtcaagtcggccggaaaatattccccccaaggagttcctctttaaacacccgaagcgcacggccaccctcagcatgaggaacacgagcgtcatgaagaaagggggcatattctctgcagaatttctgaaagttttccttccatctctgctgctctctcatttgctggccatcggattggggatctatattggaaggcgtctgacaacctccaccagcaccttttgatgaagaactggagtctgacttggttcgttagtggattacttctgagcttgcaacatagctcactgaagagctgttagatcctggggtggccacgtcacttgtgtttatttgttctgtaaatgctgcgttcctaatttagtaaaataaaagaatagacactaaaatcatgttgatctataattacacctatgggatcaataagcatgtcagactgattaatgtctactgtgaaaatttggtagtaaattttcatttgatattagatataaatatctgaatataaataattttaatatactagtcatgatgtgtgttgtattttaaaaattatctgcaaccttaattcagctgaagtactttatatttcaaaagaatgaataacattgataataaaatcgctactttaaggggtttgtccaaaataaatattgtggccttatatatcacactattgtagaaagtattatttaatttaaatggatgcaggttgtctactaaagaaagattatatataactatgctaattgttcataatcaacagaaaccaagatagagctacaaactcagctgtacagttcgtacactaaactcttcttgcttttgcattataaggaattaagtctccgattattaggtgatcaccctggatgatcagttttctgctgaaggcacctactcagtatcttttcctctttatcactctgcattggtgaatttaatcctctcctttgtgttcaacttttgtgtgcttttaaaatcagctttattctaagcaaatctgtgtctactttaaaaaactggaaatggaaaaaaaaataaatctt

SEQ ID NO: 59 - DNA, 1676 bp, Homo sapiens
gtgcgcgcgcccggtccgcgcctccgccgctttttatagcggccgcgggcggcggcggcagcggttggaggttgtaggaccggcgaggaataggaatcatggcggctgcgctgttcgtgctgctgggattcgcgctgctgggcacccacggagcctccggggctgccggcacagtcttcactaccgtagaagaccttggctccaagatactcctcacctgctccttgaatgacagcgccacagaggtcacagggcaccgctggctgaaggggggcgtggtgctgaaggaggacgcgctgcccggccagaaaacggagttcaaggtggactccgacgaccagtggggagagtactcctgcgtcttcctccccgagcccatgggcacggccaacatccagctccacgggcctcccagagtgaaggctgtgaagtcgtcagaacacatcaacgagggggagacggccatgctggtctgcaagtcagagtccgtgccacctgtcactgactgggcctggtacaagatcactgactctgaggacaaggccctcatgaacggctccgagagcaggttcttcgtgagttcctcgcagggccggtcagagctacacattgagaacctgaacatggaggccgaccccggccagtaccggtgcaacggcaccagctccaagggctccgaccaggccatcatcacgctccgcgtgcgcagccacctggccgccctctggcccttcctgggcatcgtggctgaggtgctggtgctggtcaccatcatcttcatctacgagaagcgccggaagcccgaggacgtcctggatgatgacgacgccggctctgcacccctgaagagcagcgggcagcaccagaatgacaaaggcaagaacgtccgccagaggaactcttcctgaggcaggtggcccgaggacgctccctgctccacgtctgcgccgccgccggagtccactcccagtgcttgcaagattccaagttctcacctcttaaagaaaacccaccccgtagattcccatcatacacttccttcttttttaaaaaagttgggttttctccattcaggattctgttccttaggtttttttccttctgaagtgtttcacgagagcccgggagctgctgccctgcggccccgtctgtggctttcagcctctgggtctgagtcatggccgggtgggcggcacagccttctccactggccggagtcagtgccaggtccttgccctttgtggaaagtcacaggtcacacgaggggccccgtgtcctgcctgtctgaagccaatgctgtctggttgcgccatttttgtgcttttatgtttaattttatgagggccacgggtctgtgttcgactcagcctcagggacgactctgacctcttggccacagaggactcacttgcccacaccgagggcgaccccgtcacagcctcaagtcactcccaagccccctccttgtctgtgcatccgggggcagctctggagggggtttgctggggaactggcgccatcgccgggactccagaaccgcagaagcctccccagctcacccctggaggacggccggctctctatagcaccagggctcacgtgggaacccccctcccacccaccgccacaataaagatcgcccccacctccaccctcaaaaaaaaaaaaaaaaaaaa

SEQ ID NO: 60 - DNA, 1766 bp, Homo sapiens
ttcggcttagtctgcggtcctcttgcattgcgactccgagtttaacttccaacacacactttcaacctccaagagacgcccccacctgtgtcgccccaatagcgacttttctcaccgtggtcgccgcggaacttcaagggtccttcctacccgcgttgctgagagtctgggtttacgcgtcacctcgggcgggacccgatcctccgctcctgaggcccccacaatgaagcagtcggacgcgtctccccaagaaagccggcacagtcttcactaccgtagaagaccttggctccaagatactcctcacctgctccttgaatgacagcgccacagaggtcacagggcaccgctggctgaaggggggcgtggtgctgaaggaggacgcgctgcccggccagaaaacggagttcaaggtggactccgacgaccagtggggagagtactcctgcgtcttcctccccgagcccatgggcacggccaacatccagctccacgggcctcccagagtgaaggctgtgaagtcgtcagaacacatcaacgagggggagacggccatgctggtctgcaagtcagagtccgtgccacctgtcactgactgggcctggtacaagatcactgactctgaggacaaggccctcatgaacggctccgagagcaggttcttcgtgagttcctcgcagggccggtcagagctacacattgagaacctgaacatggaggccgaccccggccagtaccggtgcaacggcaccagctccaagggctccgaccaggccatcatcacgctccgcgtgcgcagccacctggccgccctctggcccttcctgggcatcgtggctgaggtgctggtgctggtcaccatcatcttcatctacgagaagcgccggaagcccgaggacgtcctggatgatgacgacgccggctctgcacccctgaagagcagcgggcagcaccagaatgacaaaggcaagaacgtccgccagaggaactcttcctgaggcaggtggcccgaggacgctccctgctccacgtctgcgccgccgccggagtccactcccagtgcttgcaagattccaagttctcacctcttaaagaaaacccaccccgtagattcccatcatacacttccttcttttttaaaaaagttgggttttctccattcaggattctgttccttaggtttttttccttctgaagtgtttcacgagagcccgggagctgctgccctgcggccccgtctgtggctttcagcctctgggtctgagtcatggccgggtgggcggcacagccttctccactggccggagtcagtgccaggtccttgccctttgtggaaagtcacaggtcacacgaggggccccgtgtcctgcctgtctgaagccaatgctgtctggttgcgccatttttgtgcttttatgtttaattttatgagggccacgggtctgtgttcgactcagcctcagggacgactctgacctcttggccacagaggactcacttgcccacaccgagggcgaccccgtcacagcctcaagtcactcccaagccccctccttgtctgtgcatccgggggcagctctggagggggtttgctggggaactggcgccatcgccgggactccagaaccgcagaagcctccccagctcacccctggaggacggccggctctctatagcaccagggctcacgtgggaacccccctcccacccaccgccacaataaagatcgcccccacctccaccctcaaaaaaaaaaaaaaaaaaaa

SEQ ID NO: 61 - DNA, 1609 bp, Homo sapiens
ttcggcttagtctgcggtcctcttgcattgcgactccgagtttaacttccaacacacactttcaacctccaagagacgcccccacctgtgtcgccccaatagcgacttttctcaccgtggtcgccgcggaacttcaagggtccttcctacccgcgttgctgagagtctgggtttacgcgtcacctcgggcgggacccgatcctccgctcctgaggcccccacaatgaagcagtcggacgcgtctccccaagaaagggtggactccgacgaccagtggggagagtactcctgcgtcttcctccccgagcccatgggcacggccaacatccagctccacgggcctcccagagtgaaggctgtgaagtcgtcagaacacatcaacgagggggagacggccatgctggtctgcaagtcagagtccgtgccacctgtcactgactgggcctggtacaagatcactgactctgaggacaaggccctcatgaacggctccgagagcaggttcttcgtgagttcctcgcagggccggtcagagctacacattgagaacctgaacatggaggccgaccccggccagtaccggtgcaacggcaccagctccaagggctccgaccaggccatcatcacgctccgcgtgcgcagccacctggccgccctctggcccttcctgggcatcgtggctgaggtgctggtgctggtcaccatcatcttcatctacgagaagcgccggaagcccgaggacgtcctggatgatgacgacgccggctctgcacccctgaagagcagcgggcagcaccagaatgacaaaggcaagaacgtccgccagaggaactcttcctgaggcaggtggcccgaggacgctccctgctccacgtctgcgccgccgccggagtccactcccagtgcttgcaagattccaagttctcacctcttaaagaaaacccaccccgtagattcccatcatacacttccttcttttttaaaaaagttgggttttctccattcaggattctgttccttaggtttttttccttctgaagtgtttcacgagagcccgggagctgctgccctgcggccccgtctgtggctttcagcctctgggtctgagtcatggccgggtgggcggcacagccttctccactggccggagtcagtgccaggtccttgccctttgtggaaagtcacaggtcacacgaggggccccgtgtcctgcctgtctgaagccaatgctgtctggttgcgccatttttgtgcttttatgtttaattttatgagggccacgggtctgtgttcgactcagcctcagggacgactctgacctcttggccacagaggactcacttgcccacaccgagggcgaccccgtcacagcctcaagtcactcccaagccccctccttgtctgtgcatccgggggcagctctggagggggtttgctggggaactggcgccatcgccgggactccagaaccgcagaagcctccccagctcacccctggaggacggccggctctctatagcaccagggctcacgtgggaacccccctcccacccaccgccacaataaagatcgcccccacctccaccctcaaaaaaaaaaaaaaaaaaaa

SEQ ID NO: 62 - DNA, 2024 bp, Homo sapiens
gtgcgcgcgcccggtccgcgcctccgccgctttttatagcggccgcgggcggcggcggcagcggttggaggttgtaggaccggcgaggaataggaatcatggcggctgcgctgttcgtgctgctgggattcgcgctgctgggcacccacggagcctccggggctgccggcttcgtccaggcgccgctgtcccagcagaggtgggtggggggcagtgtggagctgcactgcgaggccgtgggcagcccggtgcccgagatccagtggtggtttgaagggcagggtcccaacgacacctgctcccagctctgggacggcgcccggctggaccgcgtccacatccacgccacctaccaccagcacgcggccagcaccatctccatcgacacgctcgtggaggaggacacgggcacttacgagtgccgggccagcaacgacccggatcgcaaccacctgacccgggcgcccagggtcaagtgggtccgcgcccaggcagtcgtgctagtcctggaacccggcacagtcttcactaccgtagaagaccttggctccaagatactcctcacctgctccttgaatgacagcgccacagaggtcacagggcaccgctggctgaaggggggcgtggtgctgaaggaggacgcgctgcccggccagaaaacggagttcaaggtggactccgacgaccagtggggagagtactcctgcgtcttcctccccgagcccatgggcacggccaacatccagctccacgggcctcccagagtgaaggctgtgaagtcgtcagaacacatcaacgagggggagacggccatgctggtctgcaagtcagagtccgtgccacctgtcactgactgggcctggtacaagatcactgactctgaggacaaggccctcatgaacggctccgagagcaggttcttcgtgagttcctcgcagggccggtcagagctacacattgagaacctgaacatggaggccgaccccggccagtaccggtgcaacggcaccagctccaagggctccgaccaggccatcatcacgctccgcgtgcgcagccacctggccgccctctggcccttcctgggcatcgtggctgaggtgctggtgctggtcaccatcatcttcatctacgagaagcgccggaagcccgaggacgtcctggatgatgacgacgccggctctgcacccctgaagagcagcgggcagcaccagaatgacaaaggcaagaacgtccgccagaggaactcttcctgaggcaggtggcccgaggacgctccctgctccacgtctgcgccgccgccggagtccactcccagtgcttgcaagattccaagttctcacctcttaaagaaaacccaccccgtagattcccatcatacacttccttcttttttaaaaaagttgggttttctccattcaggattctgttccttaggtttttttccttctgaagtgtttcacgagagcccgggagctgctgccctgcggccccgtctgtggctttcagcctctgggtctgagtcatggccgggtgggcggcacagccttctccactggccggagtcagtgccaggtccttgccctttgtggaaagtcacaggtcacacgaggggccccgtgtcctgcctgtctgaagccaatgctgtctggttgcgccatttttgtgcttttatgtttaattttatgagggccacgggtctgtgttcgactcagcctcagggacgactctgacctcttggccacagaggactcacttgcccacaccgagggcgaccccgtcacagcctcaagtcactcccaagccccctccttgtctgtgcatccgggggcagctctggagggggtttgctggggaactggcgccatcgccgggactccagaaccgcagaagcctccccagctcacccctggaggacggccggctctctatagcaccagggctcacgtgggaacccccctcccacccaccgccacaataaagatcgcccccacctccaccctcaaaaaaaaaaaaaaaaaaaa

SEQ ID NO: 63 - DNA, 3812 bp, Homo sapiens
aatcaaaaaactaattcttccaaagagcgactcttactgtttctcatggtgagaagacaatatttgctttctctttttcctttcttccggatgagaggctaagccataatagaaagaatggagaattattgattgaccgtctttattctgtgggctctgattctccaatgggaataccaagggatggttttccatactggaacccaaaggtaaagacactcaaggacagacatttttggcagagcatagatgaaaatggcaagttccctggctttccttctgctcaactttcatgtctccctcctcttggtccagctgctcactccttgctcagctcagttttctgtgcttggaccctctgggcccatcctggccatggtgggtgaagacgctgatctgccctgtcacctgttcccgaccatgagtgcagagaccatggagctgaagtgggtaagttccagcctaaggcaggtggtgaacgtgtatgcagatggaaaggaagtggaagacaggcagagtgcaccgtatcgagggagaacttcgattctgcgggatggcatcactgcagggaaggctgctctccgaatacacaacgtcacagcctctgacagtggaaagtacttgtgttatttccaagatggtgacttctatgaaaaagccctggtggagctgaaggttgcagcactgggttctaatcttcacgtcgaagtgaagggttatgaggatggagggatccatctggagtgcaggtccaccggctggtacccccaaccccaaatacagtggagcaacgccaagggagagaacatcccagctgtggaagcacctgtggttgcagatggagtgggcctatatgaagtagcagcatctgtgatcatgagaggcggctccggggagggtgtatcctgcatcatcagaaattccctcctcggcctggaaaagacagccagcatttccatcgcagaccccttcttcaggagcgcccagccctggatcgcagccctggcagggaccctgcctatcttgctgctgcttctcgccggagccagttacttcttgtggagacaacagaaggaaataactgctctgtccagtgagatagaaagtgagcaagagatgaaagaaatgggatatgctgcaacagagcgggaaataagcctaagagagagcctccaggaggaactcaagaggaaaaaaatccagtacttgactcgtggagaggagtcttcgtccgataccaataagtcagcctgatgctctaatggaaaaatggccctcttcaagcctggtgaggaaatgcttcagatgaggctccaccttgttaaataaattggatgtatggaaaaatagactgcagaaaaggggaactcatttagctcacgagtggtcgagtgaagattgaaaattaacctctgagggccagcacagcagctcatgcctgtaatcctagcactttggaaggctgaggagggcggatcacaaggtcaggagatcaagaccatcctggctaacacggtgaaaccccgtctctactaaaaatacaaaaaataaaaaattagccgggcatggtgacgggcacctgtagtcccagctactcgggaggctgaggcaggagaatggcatgaacccggaaggcagagcttgcagtgagccgagatcacgccactgcactccagcctgggagacagagcgagactctgtctcaagaaaaaaaaaaaaaaaaaaaaagaaaagaaaattaacctctgagtataaagcatcagtgggcagaatcaatgtggggagggaaacaacaaaaatgtagaaagaggatccttgttgcttcttggggccgcatcagggtattgggttaggcagatactgaccttactttcatttcccctctggtcactagacccctggggctttcaccaatgacattgatgagagaatcacattcagggcaggctagggacacggggttctggaaggacctcctcagcatggcccaagccttgcatgctgtggctcttaaatccaggaaaaatggctgaccccatggacacctcctcaaactctctgcagcagatgtaattctgtatccagacatggcaaatgccatcctccttgtttctgaggaccagaggagtgtacagcgtgctgaggagccccatgacctaccagacaaccctgagagatttgaatggcgttactgtgtgcttggctgtgaaagcttcatgtcagagagacactactgggaggtggaagtgggggacagaaaagagtggcatattggggtatgtagtaagaacgtggagaggaaaaaagtttgggtcaaaatgacaccggagaacggatactggactatgggcctgactgatgggaataagtatcgggctctcactgagcccagaaccaacctgaaacttcctgagcctcctaggaaagtgggggtcatcctggactatgagactggacatatctcgttctacaatgccacggatggatctcatatctacacatttctgcacgcctcttcctctgagcctctgtatcctgtattcagaattttgaccttggagcccactgccctgaccgtttgcccaataccaaaagtagagagttcccccgatcccgacctagtgcctgatcattccctggagataccactgaccccaggcttagctaatgaaagtggggagcctcaggctgaagtaacatctctgcttctccctgcccagcctggagctaagggtctcaccctccacaacagccagtcagaaccataaagctacaggcacacactgaagcactttactgatattcattcaattattccataggacagttgtttgagtttggtgccaccttattggcccctttatacagataaggaaactggggtgtagaaaagtgtattgactttacaaagcagacaggaatagtgaacaacagagctgggatctgaacaacaatgactaacattaatggagaatttaaaacgttctgagtgctgtgttatgagctttggtgggtgtcactcctttaatcctcacaacaccctgtcaggtagtctcatttggcaagtatggaagcagaggcagggcaacattaagtagcttacataactcacacggtaatttgtgcagttgggagatgttcagcttcagtccctggccaattgcccgttcttttccagcctgatttttcctgcatgggaagagcccacatgtagccctgaggttcccttcccaggacagctccaggatcgagatcactgtgagtggttgtggagttaagacccctatggactccttcccagctgattatcagagccttagacccagcactccttggattggctctgcagagtgtcttggttgagagaataacgttgcagttcccacagggcatgtgactttgaaagagactagaggccacactcagttaataatggggcacagatgtgttcccacccaacaaatgtgataagtgatcgtgcagccagagccagccttccttcagtcaaggtttccaggcagagcaaataccctagagattctctgtaatattggtaatttggatgaaggaagctagaagaattacagggatgtttttaatcccactatggactcagtctcctggaaaaggatctgtccactcctggtcattggtggatgttaaacccatattcctttcaactgctgcctgctagggaaaactgctcctcattatcatcactattattgctcaccactgtatcccctctactgggcaagtgcttgtcaagttctagttgttcaataaatttgttaataatgctgactcttcaa

SEQ ID NO: 64 - DNA, 672 bp, Homo sapiens
caggccagccctggggcgccttaaaaaccggagctggcgcttggcatcgccactctgggcaggatccaacgtcgctccagctgctcttgacgactccacagataccccgaagccatggcaagcaagggcttgcaggacctgaagcaacaggtggaggggaccgcccaggaagccgtgtcagcggccggagcggcagctcagcaagtggtggaccaggccacagaggcggggcagaaagccatggaccagctggccaagaccacccaggaaaccatcgacaagactgctaaccaggcctctgacaccttctctgggattgggaaaaaattcggcctcctgaaatgacagcagggagacttgggtcggcctcctgaaatgacagcagggagacttgggtgaccccccttccaggcgccatctagcacagcctggccctgatctccgggcagccaccacctcctcggtctgccccctcattaaaattcacgttcccaccctgtgtccacttcatgattcctcgcaagctgggcccagtcctctcatcccaagagcagagccaccgtagccggagtcctagcctcccaaattcggaaatccaatccaacggtctcaggaatgttttccatcccgccacgcgcctcccgaagctcccagaccggaggctcagccccc

SEQ ID NO: 65 - DNA, 1240 bp, Homo sapiens
aatatggaacagaaagctggcccggctaaagcggctcagtagttggaagtcatcagccagtgaagcaagcacaatcagcaaatctagcagagccgttagtgcatcttctccaagaagggccgttcataaaaaaaacaacaaggtttatttttcaggaaaaagacaggcgtgtcctaattgggttttccagaccttggttataactctgattgctgtgatggcattttgtgctttgacgatagttgccctctatatacttagcttaaaagatcaagaccgacgtgtcccaaatctccctccaagcaatatcacaagctcacaggagccggctctgctgcccacagcctcctcctcagcacctaatacatccctggtaaccacaccggcctccttacaagtacctgaaattactttctgtgaaatcctgccgtgtcaggagacttactgctgccccatccggggaatgaaagaagtctcttcaagtcctgtgcaaagacaatctgaggagaaggaattccatcagaggcgatggtcagaagacaaaagcaaatcagttttggcaagaaatgcactcagcggccctgactgggagagtgactggattgatacaaccatcagttctattcagattatggaaatccagcaaataatagatcatcagtattgcattcaaagcctccagtgcggatctggaaattataattacaatattcctgttaataaacacacacccaccaatgtcaagttctctctggaaataaacacaacagagccattgatagtcttccagtgcaaattcacccttggaaatatatgtttccatagtaaaaggggaaccaaagggatggaaagccacagagaaatctcccaggagatgacacagggatatcagcacatttggagcctccctgtagccccattttctgacagcatgttccatttccgtgtagctgcaccggatttagctgactgttcaactgatccttattttgctgggatattcttcaccgattacttcttttacttctatcgacgctgtgcctaatttgttcaagtttggggactttaccaaagaaaaatactcaggaatacatttaacagaaacgaacatcctcttgcaacttcttttttcttctttgtaaaacatcatttacgtttattgctgaaggactttttcaggctttagcttccaacagttttgagacattaatgaggagaataaaatgtttgctgaaacttg

SEQ ID NO: 66 - DNA, 1477 bp, Homo sapiens
gggacacggcgcgggatggacgcgcaggactgccaggcggccgcatcgcccgagccgcccgggcccccagcccgtagctgcgtggccgcctggtgggacatggtcgaccgcaacctgcggcacacagtccccagctgccggggggaagatgccaaggggaaggactgttgctggtatgaagcagcccttcgtgatgggaacccaattattgtttatcttcatggcagtgcagaacacagggcagcttcgcacagactgaagctggtaaaggtgctgagtgatggtggctttcatgtcttgtctgttgactacagaggatttggggactctacaggtaagcccacagaggagggactgactacggatgccatttgtgtctatgagtggaccaaggcaagaagtggcatcactcccgtgtgtctctggggccactctctgggtacaggagttgcaacaaatgctgcaaaagtgctagaagaaaaaggatgcccagttgatgctattgtcttggaagctccatttaccaacatgtgggttgcaagtatcaattatcccttgttaaagatttaccggaacattccaggatttttacgtacacttatggatgccctgagaaaagacaaaataatctttcctaatgatgaaaatgttaaattcctttcttctcctcttctcatcttacatggagaggatgacaggacagtgcctttggagtatgggaaaaagctctatgaaattgcacgcaatgcatacaggaacaaagagagggtcaagatggttatctttcctcctggcttccaacacaacctgctttgtaaaagccccacactgttaataaccgtgagagatttcctgagcaagcagtggtcatgagtctgggaggagtggaaatcttcaatgaagacttggcccaaacaccacctgtgatgtatattgttctaatgtaaaattgtactgggctggtcggatgagctgaggccattgacttctctacaaatcacttgccattttaacaacagaaagtacgaatgttaggcagtatggaatgttcttatttagcttatcataatctactttgtaaaacatgctgaaacctcactgtggagaaccagaatttggtaaaatctagatcctatctaaaaatatgtagttattaaacattctgtggatatttgtgaataaggtagttgctatggtccgaatatctgggcctgcccccccaaattatgctgaaacctaatcaccagtgtgatggtaataggaggtgggactgagctctgatgaatgagattagtgcccttataaattatgaccaaaagagctcttcactcctcctaccatttgaggatacagtgagaagccttcatctatgaaccacaaagtagccctcatcagacactgaatcagccagtgccttgctcttggacttcccagcccccagaactgtgagaaataaatttctgttgtttataagcta

SEQ ID NO: 67 - DNA, 1580 bp, Homo sapiens
gggacacggcgcgggatggacgcgcaggactgccaggcggccgcatcgcccgagccgcccgggcccccagcccgtagctgcgtggccgcctggtgggacatggtcgaccgcaacctgcgtcaaagccccatttcttgtggatttaaagaaaccagagttaaagattcctcacacagtgaacttctacctgagagttgaacctggggtgatgctagggatctggcacacagtccccagctgccggggggaagatgccaaggggaaggactgttgctggtatgaagcagcccttcgtgatgggaacccaattattgtttatcttcatggcagtgcagaacacagggcagcttcgcacagactgaagctggtaaaggtgctgagtgatggtggctttcatgtcttgtctgttgactacagaggatttggggactctacaggtaagcccacagaggagggactgactacggatgccatttgtgtctatgagtggaccaaggcaagaagtggcatcactcccgtgtgtctctggggccactctctgggtacaggagttgcaacaaatgctgcaaaagtgctagaagaaaaaggatgcccagttgatgctattgtcttggaagctccatttaccaacatgtgggttgcaagtatcaattatcccttgttaaagatttaccggaacattccaggatttttacgtacacttatggatgccctgagaaaagacaaaataatctttcctaatgatgaaaatgttaaattcctttcttctcctcttctcatcttacatggagaggatgacaggacagtgcctttggagtatgggaaaaagctctatgaaattgcacgcaatgcatacaggaacaaagagagggtcaagatggttatctttcctcctggcttccaacacaacctgctttgtaaaagccccacactgttaataaccgtgagagatttcctgagcaagcagtggtcatgagtctgggaggagtggaaatcttcaatgaagacttggcccaaacaccacctgtgatgtatattgttctaatgtaaaattgtactgggctggtcggatgagctgaggccattgacttctctacaaatcacttgccattttaacaacagaaagtacgaatgttaggcagtatggaatgttcttatttagcttatcataatctactttgtaaaacatgctgaaacctcactgtggagaaccagaatttggtaaaatctagatcctatctaaaaatatgtagttattaaacattctgtggatatttgtgaataaggtagttgctatggtccgaatatctgggcctgcccccccaaattatgctgaaacctaatcaccagtgtgatggtaataggaggtgggactgagctctgatgaatgagattagtgcccttataaattatgaccaaaagagctcttcactcctcctaccatttgaggatacagtgagaagccttcatctatgaaccacaaagtagccctcatcagacactgaatcagccagtgccttgctcttggacttcccagcccccagaactgtgagaaataaatttctgttgtttataagcta

SEQ ID NO: 68 - DNA, 928 bp, Homo sapiens
cgagcccgtgcgggccctttaagggccgggggcgtgtagcgggcccgccccctccccgcggcgcccgcagtccgttaagtgcgagccccggcgcaggggccggatctggccgggggccggcggcggtgtgggagcggcgcgtcatgtacaccatcaccaaggggcccagcaagctggtcgcgcagcgccgcacaggtcccacgcagcagcaggtggagggccggctcggcgagctcctgaaatgccggcagcccgcgccgccgacctcgcagcccccgcgggcgcagccctttgcgcagccgccgggaccctggcccctgtcgagtccagggccaaggcttgtgttcaatcgtgtgaatggccggcgggccccctccacgtccccatccttcgaggggacccaggagacctacacagtggcccacgaggagaatgtccgctttgtgtccgaagcctggcagcaggtgcaacagcagctggatggtggcccagccggtgagggcgggccaaggcctgtgcagtacgtggagaggacccccaatccccggctgcagaactttgtgcccattgacctagacgagtggtgggcgcagcagttcctggcgagaatcaccagctgttcctagtggctgctgggagggggcgctgctacacggccgacctgtcgccaggagagaagcatggcgccctgcccacccactgcgcctggctgggtgccggccacacctgaagtgccagcatttggacttttgcacctttttttcccttggcccggctgtcccaaccaagctgccatggccaagggccgaacccgtctgacctcagccctgctcactgtgcccagggaccagcgaccagcccctggggctggcagggaggagctccaggctaataaagtggagaaactgtcaaaaaaaaaaaaaaaaaa

SEQ ID NO: 69 - DNA, 5502 bp, Homo sapiens
agtggcagggtgggggccaggcagcacagatgaagcatttacctatctaggtaagtcaggaggagctcaaaaggagaagaaaacagtaggaggcaggggaagcagcctctgtctccatctctgccctttgaaacaaaagggtatttcttttctctcttcagcccccaacccagtggaggcccggcttgggacattgttcacttcccctcgcttcccctctagaagccccctttgccatccctgcaccttgtttcgggtgatgcccgagagggagctgtggccagcggggactggctcagaacccgtgacccgtgtcggcagctgtgacagcatgatgagcagcacctccacccgctctggatctagtgatagcagctacgacttcctgtccactgaagagaaggagtgtctgctcttcctggaggagaccattggctcactggacacggaggctgacagcggactgtccactgacgagtctgagccagccacaactcccagaggtttccgagcactgcccataacccaacccactccccggggaggtccagaggagaccatcactcagcaaggacgaacgccaaggacagtaactgagtccagctcatcccaccctcctgagccccagggcctaggcctcaggtctggctcctacagcctccctaggaatatccacattgccagaagccagaacttcaggaaaagcaccacccaggctagcagtcacaaccctggagaaccggggaggcttgcgccagagcctgagaaagaacaggtcagccagagcagccaacccaggcaggcacctgccagcccccaggaggctgcccttgacttggacgtggtgctcatccctccgccagaagctttccgggacacccagccagagcagtgtagggaagccagcctgcccgaggggccaggacagcagggccacacaccccagctccacacaccatccagctcccaggaaagagagcagactccttcagaagccatgtcccaaaaagccaaggaaacagtctcaaccaggtacacacaaccccagcctcctcctgcagggttgcctcagaatgcaagagctgaagatgctcccctctcatcaggggaggacccaaacagccgactagctcccctcacaacccctaagccccggaagctgccacctaatattgttctgaagagcagccgaagcagtttccacagtgacccccagcactggctgtcccgccacactgaggctgcccctggagattctggcctgatctcctgttcactgcaagagcagagaaaagcacgtaaagaagctctagagaagctggggctaccccaggatcaagatgagcctggactccacttaagtaagcccaccagctccatcagacccaaggagacacgggcccagcatctgtccccagctccaggtctggctcagcctgcagctccagcccaggcctcagcagctattcctgctgctgggaaggctctggctcaagctccggctccagctccaggtccagctcagggacctttgccaatgaagtctccagctccaggcaatgttgcagctagcaaatctatgccaatttctatccctaaggccccaagggcaaacagtgccctgactccaccgaagccagagtcagggctgactctccaggagagcaacacccctggcctgagacagatgaacttcaagtccaacactctggagcgctcaggcgtgggactgagcagctacctttcaactgagaaagatgccagccccaaaaccagcacttctctgggaaagggctccttcttggacaagatctcgcccagtgtcttacgtaattctcggccccgcccggcctccctgggcacggggaaagattttgcaggtatccaggtaggcaagctggctgacctggagcaggagcagagctccaagcgcctgtcctaccaaggacagagccgtgacaagcttcctcgccccccctgtgtcagtgtcaagatctccccaaagggtgtccccaatgaacacagaagggaggccctgaagaagctgggactgttgaaggagtagactctgcgaccagtacagaccctgtcctggctgaacaagaagagacacatgctccacttgggagcctttgccaccacgcaactcagggctcaagatgaatgggagggagagatttgagtccaagcatacatttatattcagtgttgtgccattgagttcccatgtggatcattctgaaggtgatctccacaagagggtgtgtgtgtgtgtgtttggtgtgtgtgtggagggggggccgctggatacatcactgaagctattgatataacacaatgagtcactgttcagaattttgctcttgttagatgttttcttacattgggtagagtccagcctagtgagagctgagtgaaggggctggccatgcctgagacaaaaagtcaaatgagacaatggacgtgtcaatgacttgaaaaaaagtcacatccagcaaatgcagggtcacatgaaatatgggcctcctggaatccctacagtggatggagactggctcataccttgccagatccctctctcagttccagccttctggacaaggcctgggctaagaggagctgattcgttatctcttcacccactgccctctcagtatcaccagtcccaaagacaggatacgtccctgtaacccaatctctcggttgattgatagcagaacagctcttgttggtctgagaaggcaggataagtgaccacatatttatgccactacctccaccagggagagtccttctccacaggcttgataaattcaatcaccaactgtgctgtcgtccctgactctgctactcccgttcttcctgctttcctgctccgtatctcagtctgcactgaccccagggctgggctgacatcaagatgggagcccagcccacgggctttataaacacccaagaaccgtttcagatcttctctgtgctgatgcaggtagttttaaatttttctcagttccagtgatagaaaacccacacaatacatcctctgccagtcttaatagaatatcagaggtaagaggggcctcagagaagctctgacgcagtgctgctggggaagggaagtgactaaccccgggtcagcctgccatttagggaaagagctgaggttcttacccttgttgcatgctgccacctctccttagccagtgctcttgtacatccacacagcaccctaaggagccatagtcaccatcaaagactcaaccctaaggcccttcaagatctcaaagtgccttctgaagcatcagagattaaatattgttcaaactaatagttattgctgtggcttttaattttatctttggaagatagctatatggtaactcatcattaaccagaacacctctcccctcaaattccgtgaccaagttgtgcagcttgagcaaatgccgaaagagggtattatgggtgggtggtgtgggcttgcaaatacaagcttggaggtgagacatggccagacatgactcctgcttccccttaggaagtaaatcttacttatggttgtgaactgcttggagtccaggatgcccagatgtgaggggcagatgaagggaatgttgctggaaaggtgccttttaaggctgctgagaatttctggactgtgtcctgatggacgcagcaccatcaaagcccagaatttctgaaaacggtgacaaggttaacataaggacaacaaatactccaccctgtcatggtatgtgaggtgtgggtgtggcggtttctgtgtacgtttgctcatacacgcacatccaaaagcctgtgcctcattcctggccatgggtgaggacttggtctgtcacggctgatgaggactcccacaaccggccaagttatgtcttattatacacccccagaaagagagaaagctgccttctggaggactgattccacatgctatattcagctgagttgatttctgtgtctatttcaacccataacctgaagaatgatcaccttattccttattcattaattttcttgattaatagggaaacttgggaatagctataaagtaaaacttgggtggaacctggggccctggcatcacacaagtgtgattaggatggtcaaggtcatcaggagtacagcctattatattcccacatcctgagaaaggtcatttctcccacacacgacaaagtcacagacatcctgcacctgccactaggcatcctcatcctactgacatgcccatttctccagttttcttaatctgagactcccttcccttgttttttaaagataccgtgcttctccacatcctcatccttcaaggagcatattttgctcttaggatggtctttgggattcaagaatagaataataaatccaaacttggtcattcccattttgaagagatgcaagagggcccagtgaggacatccgcctccctgaaagtggtgctagacagagctgaggtcattgtatctgtgtatccacataggatttctcttaattcagcttgaattgatggggagggaggtaagagtagggtcagagttactcatcccttttcaaagaattgtgggtggaagtttgtaaaggccattcatttgattttcaaaatcaaagcgacagctctacttccacttggccttagatctctgctataccctgccatagccttgatgccactgggcacaagccacctgccaaatacaggagtggcctctcccagcctggcatgataggggggtctgtgccctcagatgtgttgacagctgctcttctgaattgccacacctgtgctacacttggaattctgtgctctgactctgcagggtaggaccacgtgccatctcacacagaggtcaaccgatgagcccactcactcgtacatgccttcttccacagtgggaagcatgatctggcaggggccgccctgtaggctggggatgggctgctgtgtgaatgttgacgttcgtttcatggagaaaggggaggtgaaagattgaagagcaggttcctgtcaatgttctgagttcgagctggaggtgtagattgaatagtctacatggtctgtgagtgtgtgagatgaacccttccatcctttgacacctggttgtatgtgtaggctaagaaggaaggaccctcctgtcagtgtgcaaagctgtaatctcatggactagaggagagggggccaaggggatggacaggagaagtcatgcagaatctaagcaggaatgcagatagaacacatctaggctcttttccccaggagagtgatgatggagcatatagatctggctcaaattcagcctccatcacttaccagtcaggaaccctggcgatatcactttaactttctgaacctcagagtcttcacctataagacggggaaaataataccaccctttcaagattgttgagataaataagtgatataaaacatgtaaagcttagttctggccacagtgtagctactcaataaatgataatactacc

SEQ ID NO: 70 - DNA, 3015 bp, Homo sapiens
gagcccgcgctcggcccgcaggacgtggagaccacgtacttctgcaacacgtgcggacagcccctatgcgcgcgctgccgcgacgagacgcaccgagcacgcatgttcgcgcgccacgacatcgtggccctgggtcagcgaagccgcgacgtgccccagaagtgcagccgtgaaggccctgcagacggccacgcgggaggccatcgcgctgctgcaggccatggtggaggaggtgcggcacagcgccgccgaggaggaggacgctatccacgccctcttcggcagcatgcaggacaggctggcagagaggaaagcgctgctgctgcaggctgtgcagagccaatacgaagagaaggacaaggccttcaaggagcagctctctcacttggccaccttgctgcccaccctgcaggtccacctggtcatctgctcctccttcctcagcttggccaacaaggctgagctcctggacctgggctatgctggcagggggcttaggccccaaggcgctgacggggccccactgcccctccccagtaggaaagatgtcggggtcacccgtccaaaagcccacgctgcaccggtccatcagcaccaaggtgctgctggcggagggcgagaacacgcccttcgcagagcactgccgccactatgaggactcctaccggcctctctgtgcagcacctgcaggcagagatgcagagcctaaaggaccaggtacaggagctgcaccgagacctcaccaagcaccactcgctcatcaaggcggagatcatgggagacgtcctgcacaagtccctgcaactggacgtgcagatcgcctcggagcacgcctccttagagggcatgagggtcgtcttccaggagatttgggaggaagcctatcagcgagtggctaatgagcaggagatttatgaaggttccagacagttggctgccgagtgaaccctctgtccctgagctaacccacatactagcagaggaggaagtcagagtcggccactaaccagatgcaaatccccacactcttccccttagcgcttgaccgtgcctcccagctgctaactggcctcaaatgatgcatgtgaggtcaggattcattgagtagaatgcccccaccaagtgcctccctctttaattagaggtcatcatggaaatggtcgggatatttacgtggtgcctggcttgagtaaaaatctgaagccagatgcttcaggattaagaccccatgctctggccttggccccacagcccagctccatgaccttctccagctgaggcaggagaatgcctacctgaccaccatcaccaagcagatcacgccctacgtccgctccattgccaaggtgaaggagcggctggagcccaggtttcaggcacccgtggatgagcagtcagagagtctacagaacacgcacgacgacagcaggaacaacgcggcctcagccaggaataatccaggaagtgtcccggaaaagagagagaagacatcagagcctaaaggaaacagctgggctccgaacggcctctcagaagagcctctactgaaaaatatggatcatcacagatccaaacagaaaaatgggggcgatgtccccacatggagggaacacccgacttagcaaatgggaccggtccccagggtcaggctcttagagcaggcacaagactgggacactggacagaaggttgttcccatgatggttttttctattttttatttttgagatggagtttcgctctgttgcccaggctggagtgtaatggtgcaatctcggctcactgcaacctctgcctcctgggttcaagcgattctcctgcctcagcctcccgagtagctgggattacaggcgcctgacaccacgccccgctaattttttgtatttttagtagagatggggtttcaccatgttggccaggctggtctcaaacgccagacctcaggtgatccacctgcctcagcctcccaaagtgctgagattacaggggtgagtcaccgcgcctggccaatgttgttgttgtttttaagacagaatttcactctttgttgcccaggctggagtgcaatggcgcaatctctggctcaccgcaacctccgcctcccaggttcaagcgattctcctacctcagcccccagagtagctgggattacaggcatgtaccatcacacccggctaattttttgtattttaagtagagagggggtttctccatgttggtcaggctggcctcgaactcccaacctcaggtgatccgcccacctcggcctcccaaaatgctgggattacaggggtaagccactgtgcccggccggttatttctttaaaaggtaatcatttgtcaagagtaaaacccagaagctctgacaggccataatttcagatcctttggcttgggcagttttgattttccccgtgtttgcatggcatgaagtcttcgtccttgtcacggtagcttgggatgactcccagtccacatggaaaacatcagggagtgacaatccagcaagaaatccctcgctagttccacacctacgcaccgagcgtcggtgtgccaggccctgtgctgggcagagtgtggtatgtcagggtgtgccggttttaggtaacaagactccaccactgagtggcacctgccctattgcaaaggaatccagttcctccggaataacagtcccactgttaacctggtgctactgggaagttccacacagtaatctgagcagtgactcatggaaggatgaggaacgtttgctccagcttctctccctttccagcaagggcagagctcctaaagccaggggttagcacctggccagcttatgtggcagatggtctcagttacaacttcgctgctttcccaaactcctgcagccctcctgagtccgacttccgttgatagcaaggcactgggtggcagcaaccttttttctagtagtttttttcccagcagttttccatttctccacagtatccttttcatttagaggagcttaataaatgctttttaaaaagt

SEQ ID NO: 71 - DNA, 1236 bp, Homo sapiens
agtctgagcccagagagccgcggggaccatggagccggtgccgctgcaggacttcgtgcgcgccttggaccccgcctccctcccgcgcgtgctgcgggtctgctcgggggtctacttcgagggctccatctatgagatctctgggaatgagtgctgcctctccacgggggacctgatcaaggtcacccaggtccgcctccagaaggtggtctgtgagaacccgaagaccagccagaccatggagctcgcccccaacttccaggtcttctcaagtcttaggattgcagcaacacgctcggctgcccaaacccaaggcgaagaccttgccagagttcatcaaggatggctccagtacgtacagcaagattcctgcccacaggaagggccacaggcccgctaagccccaaaggcaggatctagatgatgatgaacatgattatgaagaaatacttgagcaatttcagaaaaccatctaagtgctggaggaaccacgcttcctaactgctgcttctcagggaatccgacaccagccaaccattttaagcctctaaaagacctcgggcaagtctcacagaaactgagctgcagacggggagtagctttgtggaaactgatttgatggacactgcaccagcttccttcaggttctagattcttgctacttagggcgggctggtttggacctaacatctcgcacgtgactccctcagcctcagagccttgggatgcagagcagctggcagggttcctctcaatcctgcaaccccagctgtcccaccggtggatgcagaggggaatccgaggccatcaaccttggtgacagcagcgcagtgccaatgctgatcacactgcatgggagattttgttaacgtctgccacccccactctcacccccaagctctaagcccccgggaggcctggactgtcttcctcatctctgtagcaccaagcctgatagatctgtatatggtaaacaggggtttaaccacatgtggttaacatggattaatgtgggaacttggcttcaagaacacaaccttaggaccttgggccccaaaagctggtggtgaaatgaggaggagccaatttaagaagacccttatggagacctgaggctgcagaaactggtaggtttcatcaggtggttaaagtcgtcaaagttgtaagtgactaaccaagattatttcattttaaaaccatagaataaaaatgacacctgagcttctctatgaatga

SEQ ID NO: 72 - DNA, 1650 bp, Homo sapiens
agtctgagcccagagagccgcggggaccatggagccggtgccgctgcaggacttcgtgcgcgccttggaccccgcctccctcccgcgcgtgctgcgggtctgctcgggggtctacttcgagggctccatctatgagatctctgggaatgagtgctgcctctccacgggggacctgatcaaggtcacccaggtccgcctccagaaggtggtctgtgagaacccgaagaccagccagaccatggagctcgcccccaacttccagggctacttcacccccctcaacaccccacagagctatgaaaccctggaggagctggtctctgccacaactcagagctccaagcagctgcccacttgcttcatgtcgacccacaggattgtcacagagggcagggtggtgactgaggaccagctcctcatgcttgaggctgtggtgatgcacctcgggatccgctctgcccgctgtgtcctgggcatggagggtcagcaggtcatcctgcacctgcccctatcccagaaggggcccttctggacatgggagcctagtgcccctcgaactctgctccaggtcctacaggatccagccctgaaagacctcgtcctcacctgccccaccctgccctggcattccctgatcctgcggccccagtatgagatccaagccatcatgcacatcttctcaagtcttaggattgcagcaacacgctcggctgcccaaacccaaggcgaagaccttgccagagttcatcaaggatggctccagtacgtacagcaagattcctgcccacaggaagggccacaggcccgctaagccccaaaggcaggatctagatgatgatgaacatgattatgaagaaatacttgagcaatttcagaaaaccatctaagtgctggaggaaccacgcttcctaactgctgcttctcagggaatccgacaccagccaaccattttaagcctctaaaagacctcgggcaagtctcacagaaactgagctgcagacggggagtagctttgtggaaactgatttgatggacactgcaccagcttccttcaggttctagattcttgctacttagggcgggctggtttggacctaacatctcgcacgtgactccctcagcctcagagccttgggatgcagagcagctggcagggttcctctcaatcctgcaaccccagctgtcccaccggtggatgcagaggggaatccgaggccatcaaccttggtgacagcagcgcagtgccaatgctgatcacactgcatgggagattttgttaacgtctgccacccccactctcacccccaagctctaagcccccgggaggcctggactgtcttcctcatctctgtagcaccaagcctgatagatctgtatatggtaaacaggggtttaaccacatgtggttaacatggattaatgtgggaacttggcttcaagaacacaaccttaggaccttgggccccaaaagctggtggtgaaatgaggaggagccaatttaagaagacccttatggagacctgaggctgcagaaactggtaggtttcatcaggtggttaaagtcgtcaaagttgtaagtgactaaccaagattatttcattttaaaaccatagaataaaaatgacacctgagcttctctatgaatgaaaa

SEQ ID NO: 73 - DNA, 1044 bp, Homo sapiens
gcccttcccgcctctggggaagggaacttccgcttcggaccgagggcagtaggctctcggctcctggtcccactgctgctcagcccagtggcctcacaggacaccagcttcccaggaggcgtctgacacagtatgatgatgaagatcccatggggcagcatcccagtactgatgttgctcctgctcctgggcctaatcgatatctcccaggcccagctcagctgcaccgggcccccagccatccctggcatcccgggtatccctgggacacctggccccgatggccaacctgggaccccagggataaaaggagagaaagggcttccagggctggctggagaccatggtgagttcggagagaagggagacccagggattcctgggaatccaggaaaagtcggccccaagggccccatgggccctaaaggtggcccaggggcccctggagccccaggccccaaaggtgaatcgggagactacaaggccacccagaaaatcgccttctctgccacaagaaccatcaacgtccccctgcgccgggaccagaccatccgcttcgaccacgtgatcaccaacatgaacaacaattatgagccccgcagtggcaagttcacctgcaaggtgcccggtctctactacttcacctaccacgccagctctcgagggaacctgtgcgtgaacctcatgcgtggccgggagcgtgcacagaaggtggtcaccttctgtgactatgcctacaacaccttccaggtcaccaccggtggcatggtcctcaagctggagcagggggagaacgtcttcctgcaggccaccgacaagaactcactactgggcatggagggtgccaacagcatcttttccgggttcctgctctttccagatatggaggcctgacctgtgggctgcttcacatccaccccggctccccctgccagcaacgctcactctacccccaacaccaccccttgcccaaccaatgcacacagtagggcttggtgaatgctgctgagtgaatgagtaaataaactcttcaaggccaaggga

SEQ ID NO: 74 - DNA, 2526 bp, Homo sapiens
gcacacagtgcacgaagacgctgtcgggagagcccaggattcaacacgggccttgagaaatgtggctcttgtacctcctggtgccggccctgttctgcagggcaggaggctccattcccatccctcagaagttatttggggaggtgacttcccctctgttccccaagccttaccccaacaactttgaaacaaccactgtgatcacagtccccacgggatacagggtgaagctcgtcttccagcagtttgacctggagccttctgaaggctgcttctatgattatgtcaagatctctgctgataagaaaagcctggggaggttctgtgggcaactgggttctccactgggcaaccccccgggaaagaaggaatttatgtcccaagggaacaagatgctgctgaccttccacacagacttctccaacgaggagaatgggaccatcatgttctacaagggcttcctggcctactaccaagctgtggaccttgatgaatgtgcttcccggagcaaattaggggaggaggatccccagccccagtgccagcacctgtgtcacaactacgttggaggctacttctgttcctgccgtccaggctatgagcttcaggaagacaggcattcctgccaggctgagtgcagcagcgagctgtacacggaggcatcaggctacatctccagcctggagtaccctcggtcctacccccctgacctgcgctgcaactacagcatccgggtggagcggggcctcaccctgcacctcaagttcctggagccttttgatattgatgaccaccagcaagtacactgcccctatgaccagctacagatctatgccaacgggaagaacattggcgagttctgtgggaagcaaaggccccccgacctcgacaccagcagcaatgctgtggatctgctgttcttcacagatgagtcgggggacagccggggctggaagctgcgctacaccaccgagatcatcaagtgcccccagcccaagaccctagacgagttcaccatcatccagaacctgcagcctcagtaccagttccgtgactacttcattgctacctgcaagcaaggctaccagctcatagaggggaaccaggtgctgcattccttcacagctgtctgccaggatgatggcacgtggcatcgtgccatgcccagatgcaagatcaaggactgtgggcagccccgaaacctgcctaatggtgacttccgttacaccaccacaatgggagtgaacacctacaaggcccgtatccagtactactgccatgagccatattacaagatgcagaccagagctggcagcagggagtctgagcaaggggtgtacacctgcacagcacagggcatttggaagaatgaacagaagggagagaagattcctcggtgcttgccagtgtgtgggaagcccgtgaaccccgtggaacagaggcagcgcatcatcggagggcaaaaagccaagatgggcaacttcccctggcaggtgttcaccaacatccacgggcgcgggggcggggccctgctgggcgaccgctggatcctcacagctgcccacaccctgtatcccaaggaacacgaagcgcaaagcaacgcctctttggatgtgttcctgggccacacaaatgtggaagagctcatgaagctaggaaatcaccccatccgcagggtcagcgtccacccggactaccgtcaggatgagtcctacaattttgagggggacatcgccctgctggagctggaaaatagtgtcaccctgggtcccaacctcctccccatctgcctccctgacaacgataccttctacgacctgggcttgatgggctatgtcagtggcttcggggtcatggaggagaagattgctcatgacctcaggtttgtccgtctgcccgtagctaatccacaggcctgtgagaactggctccggggaaagaataggatggatgtgttctctcaaaacatgttctgtgctggacacccatctctaaagcaggacgcctgccagggggatagtgggggcgtttttgcagtaagggacccgaacactgatcgctgggtggccacgggcatcgtgtcctggggcatcgggtgcagcaggggctatggcttctacaccaaagtgctcaactacgtggactggatcaagaaagagatggaggaggaggactgagcccagaattcactaggttcgaatccagagagcagtgtggaaaaaaaaaaacaaaaaacaactgaccagttgttgataaccactaagagtctctattaaaattactgatgcagaaagaccgtgtgtgaaattctctttcctgtagtcccattgatgtactttacctgaaacaacccaaagggcccctttctttcttctgaggattgcagaggatatagttatcaatctctagttgtcactttcctcttccactttgataccattgggtcattgaatataactttttccaaataaagttttatgagaaatgccagtgtgcaaaaaaaaaaaaaaaaaaaaaaaaaaaaaa

SEQ ID NO: 75 - DNA, 2714 bp, Homo sapiens
aatcttatgaacagaaccaggacagggaggctggccggaggttcctgcagagggagcgtcaaggccctgtgctgctgtccctgggggccagaggggttgcccagcatgcccactggcaggagagagggaactgacccacttgctcctaccagcttctgaaggctccaaagtccggaggtgcagaaagccaggaccaagagacaggcagctcaccagggtggacaaatcgccagagatgtggtgcattgtcctgttttcacttttggcatgggtttatgctgagcctaccatgtatggggagatcctgtcccctaactatcctcaggcatatcccagtgaggtagagaaatcttgggacatagaagttcctgaagggtatgggattcacctctacttcacccatctggacattgagctgtcagagaactgtgcgtatgactcagtgcagataatctcaggagacactgaagaagggaggctctgtggacagaggagcagtaacaatccccactctccaattgtggaagagttccaagtcccatacaacaaactccaggtgatctttaagtcagacttttccaatgaagagcgttttacggggtttgctgcatactatgttgccacagacataaatgaatgcacagattttgtagatgtcccttgtagccacttctgcaacaatttcattggtggttacttctgctcctgccccccggaatatttcctccatgatgacatgaagaattgcggagttaattgcagtggggatgtattcactgcactgattggggagattgcaagtcccaattatcccaaaccatatccagagaactcaaggtgtgaataccagatccggttggagaaagggttccaagtggtggtgaccttgcggagagaagattttgatgtggaagcagctgactcagcgggaaactgccttgacagtttagtttttgttgcaggagatcggcaatttggtccttactgtggtcatggattccctgggcctctaaatattgaaaccaagagtaatgctcttgatatcatcttccaaactgatctaacagggcaaaaaaagggctggaaacttcgctatcatggagatccaatgccctgccctaaggaagacactcccaattctgtttgggagcctgcgaaggcaaaatatgtctttagagatgtggtgcagataacctgtctggatgggtttgaagttgtggagggacgtgttggtgcaacatctttctattcgacttgtcaaagcaatggaaagtggagtaattccaaactgaaatgtcaacctgtggactgtggcattcctgaatccattgagaatggtaaagttgaagacccagagagcactttgtttggttctgtcatccgctacacttgtgaggagccatattactacatggaaaatggaggaggtggggagtatcactgtgctggtaacgggagctgggtgaatgaggtgctgggcccggagctgccgaaatgtgttccagtctgtggagtccccagagaaccctttgaagaaaaacagaggataattggaggatccgatgcagatattaaaaacttcccctggcaagtcttctttgacaacccatgggctggtggagcgctcattaatgagtactgggtgctgacggctgctcatgttgtggagggaaacagggagccaacaatgtatgttgggtccacctcagtgcagacctcacggctggcaaaatccaagatgctcactcctgagcatgtgtttattcatccgggatggaagctgctggaagtcccagaaggacgaaccaattttgataatgacattgcactggtgcggctgaaagacccagtgaaaatgggacccaccgtctctcccatctgcctaccaggcacctcttccgactacaacctcatggatggggacctgggactgatctcaggctggggccgaacagagaagagagatcgtgctgttcgcctcaaggcggcaaggttacctgtagctcctttaagaaaatgcaaagaagtgaaagtggagaaacccacagcagatgcagaggcctatgttttcactcctaacatgatctgtgctggaggagagaagggcatggatagctgtaaaggggacagtggtggggcctttgctgtacaggatcccaatgacaagaccaaattctacgcagctggcctggtgtcctgggggccccagtgtgggacctatgggctctacacacgggtaaagaactatgttgactggataatgaagactatgcaggaaaatagcaccccccgtgaggactaatccagatacatcccaccagcctctccaagggtggtgaccaatgcattaccttctgttccttatgatattctcattatttcatcatgactgaaagaagacacgagcgaatgatttaaatagaacttgattgttgagacgccttgctagaggtagagtttgatcatagaattgtgctggtcatacatttgtggtctgactccttggggtcctttccccggagtacctattgtagataacactatgggtggggcactcctttcttgcactattccacagggataccttaattctttgtttcctctttacctgttcaaaattccatttacttgatcattctcagtatccactgtctatgtacaataaaggatgtttataagcaaaaaaaaaaaaaaaaaaaaaaaaaaaaaaaaaa

SEQ ID NO: 76 - DNA, 2813 bp, Homo sapiens
agggaatcttatgaacagaaccaggacagggaggctggccggaggttcctgcagagggagcgtcaaggccctgtgctgctgtccctgggggccagaggggttgcccagcatgcccactggcaggagagagggaactgacccacttgctcctaccagcttctgaaggtgacactgagccccaggtgacgccgcaccaccaaagaaggtgcttgtgtttgtcagacaaatacagccaggcctgccaccccttaggctccaaagtccggaggtgcagaaagccaggaccaagagacaggcagctcaccagggtggacaaatcgccagagatgtggtgcattgtcctgttttcacttttggcatgggtttatgctgagcctaccatgtatggggagatcctgtcccctaactatcctcaggcatatcccagtgaggtagagaaatcttgggacatagaagttcctgaagggtatgggattcacctctacttcacccatctggacattgagctgtcagagaactgtgcgtatgactcagtgcagataatctcaggagacactgaagaagggaggctctgtggacagaggagcagtaacaatccccactctccaattgtggaagagttccaagtcccatacaacaaactccaggtgatctttaagtcagacttttccaatgaagagcgttttacggggtttgctgcatactatgttgccacagacataaatgaatgcacagattttgtagatgtcccttgtagccacttctgcaacaatttcattggtggttacttctgctcctgccccccggaatatttcctccatgatgacatgaagaattgcggagttaattgcagtggggatgtattcactgcactgattggggagattgcaagtcccaattatcccaaaccatatccagagaactcaaggtgtgaataccagatccggttggagaaagggttccaagtggtggtgaccttgcggagagaagattttgatgtggaagcagctgactcagcgggaaactgccttgacagtttagtttttgttgcaggagatcggcaatttggtccttactgtggtcatggattccctgggcctctaaatattgaaaccaagagtaatgctcttgatatcatcttccaaactgatctaacagggcaaaaaaagggctggaaacttcgctatcatggagatccaatgccctgccctaaggaagacactcccaattctgtttgggagcctgcgaaggcaaaatatgtctttagagatgtggtgcagataacctgtctggatgggtttgaagttgtggagggacgtgttggtgcaacatctttctattcgacttgtcaaagcaatggaaagtggagtaattccaaactgaaatgtcaacctgtggactgtggcattcctgaatccattgagaatggtaaagttgaagacccagagagcactttgtttggttctgtcatccgctacacttgtgaggagccatattactacatggaaaatggaggaggtggggagtatcactgtgctggtaacgggagctgggtgaatgaggtgctgggcccggagctgccgaaatgtgttccagtctgtggagtccccagagaaccctttgaagaaaaacagaggataattggaggatccgatgcagatattaaaaacttcccctggcaagtcttctttgacaacccatgggctggtggagcgctcattaatgagtactgggtgctgacggctgctcatgttgtggagggaaacagggagccaacaatgtatgttgggtccacctcagtgcagacctcacggctggcaaaatccaagatgctcactcctgagcatgtgtttattcatccgggatggaagctgctggaagtcccagaaggacgaaccaattttgataatgacattgcactggtgcggctgaaagacccagtgaaaatgggacccaccgtctctcccatctgcctaccaggcacctcttccgactacaacctcatggatggggacctgggactgatctcaggctggggccgaacagagaagagagatcgtgctgttcgcctcaaggcggcaaggttacctgtagctcctttaagaaaatgcaaagaagtgaaagtggagaaacccacagcagatgcagaggcctatgttttcactcctaacatgatctgtgctggaggagagaagggcatggatagctgtaaaggggacagtggtggggcctttgctgtacaggatcccaatgacaagaccaaattctacgcagctggcctggtgtcctgggggccccagtgtgggacctatgggctctacacacgggtaaagaactatgttgactggataatgaagactatgcaggaaaatagcaccccccgtgaggactaatccagatacatcccaccagcctctccaagggtggtgaccaatgcattaccttctgttccttatgatattctcattatttcatcatgactgaaagaagacacgagcgaatgatttaaatagaacttgattgttgagacgccttgctagaggtagagtttgatcatagaattgtgctggtcatacatttgtggtctgactccttggggtcctttccccggagtacctattgtagataacactatgggtggggcactcctttcttgcactattccacagggataccttaattctttgtttcctctttacctgttcaaaattccatttacttgatcattctcagtatccactgtctatgtacaataaaggatgtttataagcaaaaaaaaaaaaaaaaaaaaaaaaaaaaaaaaaaaaaaaaaa

SEQ ID NO: 77 - DNA, 2558 bp, Homo sapiens
gattgaacagcgcgcgtgggtttcccgcagccctggcgcagacgcgtgggctccgtggcgatgcggggtgttgcctgaggctccactgaagctatggcataatttgcagaatttgcacttcattacttttctgaaattcaaacaaattctgaaactgcacgagttctggctgagagctgtggatctgtgcattttgatggtgacagtgcctacgtggggatgagtgacggaaacccagagctcctgtcaaccagccagacctacaacggccagagcgagaacaacgaagactatgagatccccccgataacacctcccaacctcccggagccatccctcctgcacctgggggaccacgaagccagctaccactcgctgtgccacggcctcacccccaacggtctgctccctgcctactcctatcaggccatggacctcccagccatcatggtgtccaacatgctagcacaggacagccacctgctgtcgggccagctgcccacgatccaggagatggtccactcggaagtggctgcctatgactcgggccggcccgggcccctgctgggtcgcccggcaatgctggccagccacatgagtgccctcagccagtcccagctcatctcgcagatgggcatccggagcagcatcgcccacagctccccatcaccgccggggagcaagtcagcgaccccctctccctccagctccactcaggaagaggagtcggaagtgcatttcaagatctcgggagaaaagagaccttcagccgacccaggaaaaaaggccaagaacccgaagaagaagaaaaagaaggaccccaatgagccgcagaagcctgtgtcggcctacgcactcttcttcagagacactcaggccgccatcaagggtcagaaccccagtgccactttcggtgacgtgtccaaaatcgtggcctccatgtgggacagcctgggagaggaacagaagcaggcctacaagaggaagacagaagcagcaaagaaggaatatctgaaggccctggcagcctaccgggctagcctcgtctccaagagctccccagatcaaggtgagaccaagagcactcaggcaaacccaccagccaaaatgctcccacccaagcagcccatgtatgccatgccaggcctggcctccttcctgacgccgtcggacctgcaggccttccgcagtggggcctcccctgccagcctcgcccggacgctgggctccaagtctctgctgccaggcctcagtgcgtccccgccgccgccaccctccttcccgctcagccccacactgcaccagcagctgtcactgccccctcacgcccagggcgccctcctcagtccacctgttagcatgtccccagccccccagccccctgtcctgcccacccccatggcactccaggtgcagctggcgatgagcccctcacctccagggccacaggacttcccgcacatctctgagttccccagcagctcgggatcctgctcacctggcccatccaaccccaccagcagcggggactgggacagcagctaccccagtggggagtgtggcatcagcacctgcagcctgctccccagggacaaatcgctctacctcacctaatcccgcctccctaccatccctgaggctcgctggaaggcactgctcagagcctgaagggctgacagcagaaaagaggccctggccagaggcagggtggcccatcggagagagcagtgacacacccattgcccgggggctgagtctcttcctcaacctcccaccagactctgcagaggcagcccactgcccaccaccagcccaaagaacctgcaggaaccttccgcccgctgacctgcttgctccagggtaactgtggaccctgtcctcgccctgcgcacggtaccctatgtctggacacccggccccagctccagccccagcccaggtgggccgcccctggcggggtcgcttaccaacggacacccaccccagatgcatgggccagagggccggcccccggcatagatgtgcacatcggttttccagtgtgaacaaaagattacgaaacctagaaactgttggttccgtgtaagtagttgactacgtgttttagaactgtgctgaagacatctgtaagactattttgtgggggaaaaaagtagtttcctttaaggtaaaaagcattttatatgatccttagcacatttttaagttttatcttaagggagacgcgcacaaaagcggctgccaaaccgtttcgtcatcctcacagcaaggaccggacgcttgctagccaccccggagcactgctctccttttaatcatgtattcatctattttaaattgccggcgacgacttttgtctatttatgaagaaaccttgagaacgaagttacagcttatcctaccgtgtgtgtggttttggggtttcgtttgggtttgggttcttgacgtcgtttgcagctgtttcctggccctggcgagtgtctgtcttggtgcccagtgcttctctcaaatctctttataataaaacttctgaaaagctgaaaaaaaaaaaaaaaaaa

SEQ ID NO: 78 - DNA, 3649 bp, Homo sapiens
agtcccagcccaagggtagctggaggcgcgcaggccggctccgctccggccccggacgatgcggcgcgcccaggatgctgccgtgcctcgtagtgctgctggcggcgctcctcagcctccgtcttggctcagacgctcatgggacagagctgcccagccctccgtctgtgtggtttgaagcagaatttttccaccacatcctccactggacacccatcccaaatcagtctgaaagtacctgctatgaagtggcgctcctgaggtatggaatagagtcctggaactccatctccaactgtagccagaccctgtcctatgaccttaccgcagtgaccttggacctgtaccacagcaatggctaccgggccagagtgcgggctgtggacggcagccggcactccaactggaccgtcaccaacacccgcttctctgtggatgaagtgactctgacagttggcagtgtgaacctagagatccacaatggcttcatcctcgggaagattcagctacccaggcccaagatggcccccgcaaatgacacatatgaaagcatcttcagtcacttccgagagtatgagattgccattcgcaaggtgccgggaaacttcacgttcacacacaagaaagtaaaacatgaaaacttcagcctcctaacctctggagaagtgggagagttctgtgtccaggtgaaaccatctgtcgcttcccgaagtaacaaggggatgtggtctaaagaggagtgcatctccctcaccaggcagtatttcaccgtgaccaacgtcatcatcttctttgcctttgtcctgctgctctccggagccctcgcctactgcctggccctccagctgtatgtgcggcgccgaaagaagctacccagtgtcctgctcttcaagaagcccagccccttcatcttcatcagccagcgtccctccccagagacccaagacaccatccacccgcttgatgaggaggcctttttgaaggtgtccccagagctgaagaacttggacctgcacggcagcacagacagtggctttggcagcaccaagccatccctgcagactgaagagccccagttcctcctccctgaccctcacccccaggctgacagaacgctgggaaacggggagccccctgtgctgggggacagctgcagtagtggcagcagcaatagcacagacagcgggatctgcctgcaggagcccagcctgagccccagcacagggcccacctgggagcaacaggtggggagcaacagcaggggccaggatgacagtggcattgacttagttcaaaactctgagggccgggctggggacacacagggtggctcggccttgggccaccacagtcccccggagcctgaggtgcctggggaagaagacccagctgctgtggcattccagggttacctgaggcagaccagatgtgctgaagagaaggcaaccaagacaggctgcctggaggaagaatcgcccttgacagatggccttggccccaaattcgggagatgcctggttgatgaggcaggcttgcatccaccagccctggccaagggctatttgaaacaggatcctctagaaatgactctggcttcctcaggggccccaacgggacagtggaaccagcccactgaggaatggtcactcctggccttgagcagctgcagtgacctgggaatatctgactggagctttgcccatgaccttgcccctctaggctgtgtggcagccccaggtggtctcctgggcagctttaactcagacctggtcaccctgcccctcatctctagcctgcagtcaagtgagtgactcgggctgagaggctgcttttgattttagccatgcctgctcctctgcctggaccaggaggagggcccctggggcagaagttaggcacgaggcagtctgggcacttttctgcaagtccactggggctggccccagccaggccctgcagggctggtcagggtgtctggggcaggaggaggccaactcactgaactagtgcagggtatgtgggtggcactgacctgttctgttgactggggccctgcagactctggcagagctgagaagggcagggaccttctccctcctaggaactctttcctgtatcataaaggattatttgctcaggggaaccatggggctttctggagttgtggtgaggccaccaggctgaagtcagctcagacccagacctccctgcttaggccactcgagcatcagagcttccagcaggaggaagggctgtaggaatggaagcttcagggccttgctgctggggtcatttttaggggaaaaaggaggatatgatggtcacatggggaacctcccctcatcgggcctctggggcaggaagcttgtcactggaagatcttaaggtatatattttctggacactcaaacacatcataatggattcactgaggggagacaaagggagccgagaccctggatggggcttccagctcagaacccatccctctggtgggtacctctggcacccatctgcaaatatctccctctctccaacaaatggagtagcatccccctggggcacttgctgaggccaagccactcacatcctcactttgctgccccaccatcttgctgacaacttccagagaagccatggttttttgtattggtcataactcagccctttgggcggcctctgggcttgggcaccagctcatgccagccccagagggtcagggttggaggcctgtgcttgtgtttgctgctaatgtccagctacagacccagaggataagccactgggcactgggctggggtccctgccttgttggtgttcagctgtgtgattttggactagccacttgtcagagggcctcaatctcccatctgtgaaataaggactccacctttaggggaccctccatgtttgctgggtattagccaagctggtcctgggagaatgcagatactgtccgtggactaccaagctggcttgtttcttatgccagaggctaacagatccaatgggagtccatggtgtcatgccaagacagtatcagacacagccccagaagggggcattatgggccctgcctccccataggccatttggactctgccttcaaacaaaggcagttcagtccacaggcatggaagctgtgaggggacaggcctgtgcgtgccatccagagtcatctcagccctgcctttctctggagcattctgaaaacagatattctggcccagggaatccagccatgacccccacccctctgccaaagtactcttaggtgccagtctggtaactgaactccctctggaggcaggcttgagggaggattcctcagggttcccttgaaagctttatttatttattttgttcatttatttattggagaggcagcattgcacagtgaaagaattctggatatctcaggagccccgaaattctagctctgactttgctgtttccagtggtatgaccttggagaagtcacttatcctcttggagcctcagtttcctcatctgcagaataatgactgacttgtctaattcgtagggatgtgaggttctgctgaggaaatgggtatgaatgtgccttgaacacaaagctctgtcaataagtgatacatgttttttattccaataaattgtcaagaccaca

SEQ ID NO: 79 - DNA, 5426 bp, Homo sapiens
agaaggtagcagacagacagacggatctaacctctcttggatcctccagccatgaggctgctctgggggctgatctgggcatccagcttcttcaccttatctctgcagaagcccaggttgctcttgttctctccttctgtggttcatctgggggtccccctatcggtgggggtgcagctccaggatgtgccccgaggacaggtagtgaaaggatcagtgttcctgagaaacccatctcgtaataatgtcccctgctccccaaaggtggacttcacccttagctcagaaagagacttcgcactcctcagtctccaggtgcccttgaaagatgcgaagagctgtggcctccatcaactcctcagaggccctgaggtccagctggtggcccattcgccatggctaaaggactctctgtccagaacgacaaacatccagggtatcaacctgctcttctcctctcgccgggggcacctctttttgcagacggaccagcccatttacaaccctggccagcgggttcggtaccgggtctttgctctggatcagaagatgcgcccgagcactgacaccatcacagtcatggtggagaactctcacggcctccgcgtgcggaagaaggaggtgtacatgccctcgtccatcttccaggatgactttgtgatcccagacatctcagagccagggacctggaagatctcagcccgattctcagatggcctggaatccaacagcagcacccagtttgaggtgaagaaatatgtccttcccaactttgaggtgaagatcacccctggaaagccctacatcctgacggtgccaggccatcttgatgaaatgcagttagacatccaggccaggtacatctatgggaagccagtgcagggggtggcatatgtgcgctttgggctcctagatgaggatggtaagaagactttctttcgggggctggagagtcagaccaagctggtgaatggacagagccacatttccctctcaaaggcagagttccaggacgccctggagaagctgaatatgggcattactgacctccaggggctgcgcctctacgttgctgcagccatcattgagtctccaggtggggagatggaggaggcagagctcacatcctggtattttgtgtcatctcccttctccttggatcttagcaagaccaagcgacaccttgtgcctggggcccccttcctgctgcaggccttggtccgtgagatgtcaggctccccagcttctggcattcctgtcaaagtttctgccacggtgtcttctcctgggtctgttcctgaagtccaggacattcagcaaaacacagacgggagcggccaagtcagcattccaataattatccctcagaccatctcagagctgcagctctcagtatctgcaggctccccacatccagcgatagccaggctcactgtggcagccccaccttcaggaggccccgggtttctgtctattgagcggccggattctcgacctcctcgtgttggggacactctgaacctgaacttgcgagccgtgggcagtggggccaccttttctcattactactacatgatcctatcccgagggcagatcgtgttcatgaatcgagagcccaagaggaccctgacctcggtctcggtgtttgtggaccatcacctggcaccctccttctactttgtggccttctactaccatggagaccacccagtggccaactccctgcgagtggatgtccaggctggggcctgcgagggcaagctggagctcagcgtggacggtgccaagcagtaccggaacggggagtccgtgaagctccacttagaaaccgactccctagccctggtggcgctgggagccttggacacagctctgtatgctgcaggcagcaagtcccacaagcccctcaacatgggcaaggtctttgaagctatgaacagctatgacctcggctgtggtcctgggggtggggacagtgcccttcaggtgttccaggcagcgggcctggccttttctgatggagaccagtggaccttatccagaaagagactaagctgtcccaaggagaagacaacccggaaaaagagaaacgtgaacttccaaaaggcgattaatgagaaattgggtcagtatgcttccccgacagccaagcgctgctgccaggatggggtgacacgtctgcccatgatgcgttcctgcgagcagcgggcagcccgcgtgcagcagccggactgccgggagcccttcctgtcctgctgccaatttgctgagagtctgcgcaagaagagcagggacaagggccaggcgggcctccaacgagccctggagatcctgcaggaggaggacctgattgatgaggatgacattcccgtgcgcagcttcttcccagagaactggctctggagagtggaaacagtggaccgctttcaaatattgacactgtggctccccgactctctgaccacgtgggagatccatggcctgagcctgtccaaaaccaaaggcctatgtgtggccaccccagtccagctccgggtgttccgcgagttccacctgcacctccgcctgcccatgtctgtccgccgctttgagcagctggagctgcggcctgtcctctataactacctggataaaaacctgactgtgagcgtccacgtgtccccagtggaggggctgtgcctggctgggggcggagggctggcccagcaggtgctggtgcctgcgggctctgcccggcctgttgccttctctgtggtgcccacggcagccgccgctgtgtctctgaaggtggtggctcgagggtccttcgaattccctgtgggagatgcggtgtccaaggttctgcagattgagaaggaaggggccatccatagagaggagctggtctatgaactcaaccccttggaccaccgaggccggaccttggaaatacctggcaactctgatcccaatatgatccctgatggggactttaacagctacgtcagggttacagcctcagatccattggacactttaggctctgagggggccttgtcaccaggaggcgtggcctccctcttgaggcttcctcgaggctgtggggagcaaaccatgatctacttggctccgacactggctgcttcccgctacctggacaagacagagcagtggagcacactgcctcccgagaccaaggaccacgccgtggatctgatccagaaaggctacatgcggatccagcagtttcggaaggcggatggttcctatgcggcttggttgtcacgggacagcagcacctggctcacagcctttgtgttgaaggtcctgagtttggcccaggagcaggtaggaggctcgcctgagaaactgcaggagacatctaactggcttctgtcccagcagcaggctgacggctcgttccaggacccctgtccagtgttagacaggagcatgcaggggggtttggtgggcaatgatgagactgtggcactcacagcctttgtgaccatcgcccttcatcatgggctggccgtcttccaggatgagggtgcagagccattgaagcagagagtggaagcctccatctcaaaggcaaactcatttttgggggagaaagcaagtgctgggctcctgggtgcccacgcagctgccatcacggcctatgccctgacactgaccaaggcgcctgtggacctgctcggtgttgcccacaacaacctcatggcaatggcccaggagactggagataacctgtactggggctcagtcactggttctcagagcaatgccgtgtcgcccaccccggctcctcgcaacccatccgaccccatgccccaggccccagccctgtggattgaaaccacagcctacgccctgctgcacctcctgcttcacgagggcaaagcagagatggcagaccaggcttcggcctggctcacccgtcagggcagcttccaagggggattccgcagtacccaagacacggtgattgccctggatgccctgtctgcctactggattgcctcccacaccactgaggagaggggtctcaatgtgactctcagctccacaggccggaatgggttcaagtcccacgcgctgcagctgaacaaccgccagattcgcggcctggaggaggagctgcagttttccttgggcagcaagatcaatgtgaaggtgggaggaaacagcaaaggaaccctgaaggtccttcgtacctacaatgtcctggacatgaagaacacgacctgccaggacctacagatagaagtgacagtcaaaggccacgtcgagtacacgatggaagcaaacgaggactatgaggactatgagtacgatgagcttccagccaaggatgacccagatgcccctctgcagcccgtgacacccctgcagctgtttgagggtcggaggaaccgccgcaggagggaggcgcccaaggtggtggaggagcaggagtccagggtgcactacaccgtgtgcatctggcggaacggcaaggtggggctgtctggcatggccatcgcggacgtcaccctcctgagtggattccacgccctgcgtgctgacctggagaagctgacctccctctctgaccgttacgtgagtcactttgagaccgaggggccccacgtcctgctgtattttgactcggtccccacctcccgggagtgcgtgggctttgaggctgtgcaggaagtgccggtggggctggtgcagccggccagcgcaaccctgtacgactactacaaccccgagcgcagatgttctgtgttttacggggcaccaagtaagagcagactcttggccaccttgtgttctgctgaagtctgccagtgtgctgaggggaagtgccctcgccagcgtcgcgccctggagcggggtctgcaggacgaggatggctacaggatgaagtttgcctgctactacccccgtgtggagtacggcttccaggttaaggttctccgagaagacagcagagctgctttccgcctctttgagaccaagatcacccaagtcctgcacttcaccaaggatgtcaaggccgctgctaatcagatgcgcaacttcctggttcgagcctcctgccgccttcgcttggaacctgggaaagaatatttgatcatgggtctggatggggccacctatgacctcgagggacacccccagtacctgctggactcgaatagctggatcgaggagatgccctctgaacgcctgtgccggagcacccgccagcgggcagcctgtgcccagctcaacgacttcctccaggagtatggcactcaggggtgccaggtgtgagggctgccctcccacctccgctgggaggaacctgaacctgggaaccatgaagctggaagcactgctgtgtccgctttcatgaacacagcctgggaccagggcatattaaaggcttttggcagcaaagtgtcagtgttggc

SEQ ID NO: 80 - DNA, 5426 bp, Homo sapiens; identical to SEQ ID NO: 79

SEQ ID NO: 81 - DNA, 2256 bp, Homo sapiens
tgaaattcagggactctttggtggagcaattaccagtcaacttcagggtattatgataaactctgatctggggaggaaccaggactacatagatcaaggcagttttcttctttgagaaactatcccagatatcatcatagagtcttctgctcttcctcaactaccaaagaaaaacatcagcgaagcagcaggccatgcaccccccaaaaactccatctggggctcttcatagaaaaaggaaaatggcagcctggcccttctccaggctgtggaaagtctctgatccaattctcttccaaatgaccttgatcgctgctctgttgcctgctgttcttggcaattgtggtcctccacccactttatcatttgctgccccgatggatattacgttgactgagacacgcttcaaaactggaactactctgaaatacacctgcctccctggctacgtcagatcccattcaactcagacgcttacctgtaattctgatggcgaatgggtgtataacaccttctgtatctacaaacgatgcagacacccaggagagttacgtaatgggcaagtagagattaagacagatttatcttttggatcacaaatagaattcagctgttcagaaggatttttcttaattggctcaaccactagtcgttgtgaagtccaagatagaggagttggctggagtcatcctctcccacaatgtgaaattgtcaagtgtaagcctcctccagacatcaggaatggaaggcacagcggtgaagaaaatttctacgcatacggcttttctgtcacctacagctgtgacccccgcttctcactcttgggccatgcctccatttcttgcactgtggagaatgaaacaataggtgtttggagaccaagccctcctacctgtgaaaaaatcacctgtcgcaagccagatgtttcacatggggaaatggtctctggatttggacccatctataattacaaagacactattgtgtttaagtgccaaaaaggttttgttctcagaggcagcagtgtaattcattgtgatgctgatagcaaatggaatccttctcctcctgcttgtgagcccaatagttgtattaatttaccagacattccacatgcttcctgggaaacatatcctaggccgacaaaagaggatgtgtatgttgttgggactgtgttaaggtaccgctgtcatcctggctacaaacccactacagatgagcctacgactgtgatttgtcagaaaaatttgagatggaccccataccaaggatgtgaggcgttatgttgccctgaaccaaagctaaataatggtgaaatcactcaacacaggaaaagtcgtcctgccaatcactgtgtttatttctatggagatgagatttcattttcatgtcatgagaccagtaggttttcagctatatgccaaggagatggcacgtggagtccccgaacaccatcatgtggagacatttgcaattttcctcctaaaattgcccatgggcattataaacaatctagttcatacagctttttcaaagaagagattatatatgaatgtgataaaggctacattctggtcggacaggcgaaactctcctgcagttattcacactggtcagctccagcccctcaatgtaaagctctgtgtcggaaaccagaattagtgaatggaaggttgtctgtggataaggatcagtatgttgagcctgaaaatgtcaccatccaatgtgattctggctatggtgtggttggtccccaaagtatcacttgctctgggaacagaacctggtacccagaggtgcccaagtgtgagtgggagacccccgaaggctgtgaacaagtgctcacaggcaaaagactcatgcagtgtctcccaaacccagaggatgtgaaaatggccctggaggtatataagctgtctctggaaattgaacaactggaactacagagagacagcgcaagacaatccactttggataaagaactataatttttctcaaaagaaggaggaaaaggtgtcttgctggcttgcctcttgcaattcaatacagatcagtttagcaaatctactgtcaatttggcagtgatattcatcataataaatatctagaaatgataatttgctaaagtttagtgctttgagattgtgaaattattaatcatcctctgtgtggctcatgtttttgcttttcaacacacaaagcacaaattttttttcgattaaaaatgtatgtataaaaaactaaaaaaaaaaaaaa

SEQ ID NO: 82 - DNA, 965 bp, Homo sapiens
gactttggagctctcagctttggagtcagttaagaccagttccttgctgggaagccctaactctggagggacagagacaggtgtctgagctgggtgaattccagcctggggagaggactttgatcaccagatgtttttttggtgtgcgtgctgtcttatggttgcgtggcgagtttctgcttcagatgagcactgtccagagcttcctccagtggacaatagcatatttgtcgcaaaggaggtggaaggacagattctggggacttacgtttgtatcaagggctaccacctggtaggaaagaagacccttttttgcaatgcctctaaggagtgggataacaccactactgagtgccgcttgggccactgtcctgatcctgtgctggtgaatggagagttcagttcttcagggcctgtgaatgtaagtgacaaaatcacgtttatgtgcaatgaccactacatcctcaagggcagcaatcggagccagtgtctagaggaccacacctgggcacctccctttcccatctgcaaaagtagggactgtgaccctcctgggaatccagttcatggctattttgaaggaaataacttcaccttaggatccaccattagttattactgtgaagacaggtactacttagtgggcgtgcaggagcagcaatgcgttgatggggagtggagcagtgcacttccagtctgcaagttgatccaggaagctcccaaaccagagtgtgagaaggcacttcttgcctttcaggagagtaagaacctctgcgaagccatggagaactttatgcaacaattaaaggaaagtggcatgacaatggaggagctaaaatattctctggagctgaagaaagctgagttgaaggcaaaattgttgtaacactacagctgagcagatgtaatagaaataaacctatgaataaattttcttcttggttctgaaaaaaaaaaaaaaaaaa

SEQ ID NO: 83 - DNA, 967 bp, Homo sapiens
gcaactcttttaccatccctttgtatttttgcagttcctccctataccagcttccttacagctgttctgatttcctgtcgtgtctgagctgggtgaattccagcctggggagaggactttgatcaccagatgtttttttggtgtgcgtgctgtcttatggttgcgtggcgagtttctgcttcagatgcagagcactgtccagagcttcctccagtggacaatagcatatttgtcgcaaaggaggtggaaggacagattctggggacttacgtttgtatcaagggctaccacctggtaggaaagaagacccttttttgcaatgcctctaaggagtgggataacaccactactgagtgccgcttgggccactgtcctgatcctgtgctggtgaatggagagttcagttcttcagggcctgtgaatgtaagtgacaaaatcacgtttatgtgcaatgaccactacatcctcaagggcagcaatcggagccagtgtctagaggaccacacctgggcacctccctttcccatctgcaaaagtagggactgtgaccctcctgggaatccagttcatggctattttgaaggaaataacttcaccttaggatccaccattagttattactgtgaagacaggtactacttagtgggcgtgcaggagcagcaatgcgttgatggggagtggagcagtgcacttccagtctgcaagttgatccaggaagctcccaaaccagagtgtgagaaggcacttcttgcctttcaggagagtaagaacctctgcgaagccatggagaactttatgcaacaattaaaggaaagtggcatgacaatggaggagctaaaatattctctggagctgaagaaagctgagttgaaggcaaaattgttgtaacactacagctgagcagatgtaatagaaataaacctatgaataaattttcttcttggttctgaaaaaaaaaaaaaaaaaa

SEQ ID NO: 84 - DNA, 1131 bp, Homo sapiens
attcccagaaaccaggaaatttctgaaactgagttttaaacctggcaactcttttaccatccctttgtatttttgcagttcctccctataccagcttccttacagctgttctgatttcctgtcgtaagattttttcttttcattttctccagggagggtaaatcaatataacctcttctctagagaggaggtggttaggttggtcttaagcagtgttagaagatctattttttttcaaaccaggtgtctgagctgggtgaattccagcctggggagaggactttgatcaccagatgtttttttggtgtgcgtgctgtcttatggttgcgtggcgagtttctgcttcagatgcagagcactgtccagagcttcctccagtggacaatagcatatttgtcgcaaaggaggtggaaggacagattctggggacttacgtttgtatcaagggctaccacctggtaggaaagaagacccttttttgcaatgcctctaaggagtgggataacaccactactgagtgccgcttgggccactgtcctgatcctgtgctggtgaatggagagttcagttcttcagggcctgtgaatgtaagtgacaaaatcacgtttatgtgcaatgaccactacatcctcaagggcagcaatcggagccagtgtctagaggaccacacctgggcacctccctttcccatctgcaaaagtagggactgtgaccctcctgggaatccagttcatggctattttgaaggaaataacttcaccttaggatccaccattagttattactgtgaagacaggtactacttagtgggcgtgcaggagcagcaatgcgttgatggggagtggagcagtgcacttccagtctgcaagttgatccaggaagctcccaaaccagagtgtgagaaggcacttcttgcctttcaggagagtaagaacctctgcgaagccatggagaactttatgcaacaattaaaggaaagtggcatgacaatggaggagctaaaatattctctggagctgaagaaagctgagttgaaggcaaaattgttgtaacactacagctgagcagatgtaatagaaataaacctatgaataaattttcttcttggttctgaaaaaaaaaaaaaaaaaa

SEQ ID NO: 85 - DNA, 1128 bp, Homo sapiens
attcccagaaaccaggaaatttctgaaactgagttttaaacctggcaactcttttaccatccctttgtatttttgcagttcctccctataccagcttccttacagctgttctgatttcctgtcgtaagattttttcttttcattttctccagggagggtaaatcaatataacctcttctctagagaggaggtggttaggttggtcttaagcagtgttagaagatctattttttttcaaaccaggtgtctgagctgggtgaattccagcctggggagaggactttgatcaccagatgtttttttggtgtgcgtgctgtcttatggttgcgtggcgagtttctgcttcagatgagcactgtccagagcttcctccagtggacaatagcatatttgtcgcaaaggaggtggaaggacagattctggggacttacgtttgtatcaagggctaccacctggtaggaaagaagacccttttttgcaatgcctctaaggagtgggataacaccactactgagtgccgcttgggccactgtcctgatcctgtgctggtgaatggagagttcagttcttcagggcctgtgaatgtaagtgacaaaatcacgtttatgtgcaatgaccactacatcctcaagggcagcaatcggagccagtgtctagaggaccacacctgggcacctccctttcccatctgcaaaagtagggactgtgaccctcctgggaatccagttcatggctattttgaaggaaataacttcaccttaggatccaccattagttattactgtgaagacaggtactacttagtgggcgtgcaggagcagcaatgcgttgatggggagtggagcagtgcacttccagtctgcaagttgatccaggaagctcccaaaccagagtgtgagaaggcacttcttgcctttcaggagagtaagaacctctgcgaagccatggagaactttatgcaacaattaaaggaaagtggcatgacaatggaggagctaaaatattctctggagctgaagaaagctgagttgaaggcaaaattgttgtaacactacagctgagcagatgtaatagaaataaacctatgaataaattttcttcttggttctgaaaaaaaaaaaaaaaaaa

SEQ ID NO: 86 - DNA, 968 bp, Homo sapiens
gactttggagctctcagctttggagtcagttaagaccagttccttgctgggaagccctaactctggagggacagagacaggtgtctgagctgggtgaattccagcctggggagaggactttgatcaccagatgtttttttggtgtgcgtgctgtcttatggttgcgtggcgagtttctgcttcagatgcagagcactgtccagagcttcctccagtggacaatagcatatttgtcgcaaaggaggtggaaggacagattctggggacttacgtttgtatcaagggctaccacctggtaggaaagaagacccttttttgcaatgcctctaaggagtgggataacaccactactgagtgccgcttgggccactgtcctgatcctgtgctggtgaatggagagttcagttcttcagggcctgtgaatgtaagtgacaaaatcacgtttatgtgcaatgaccactacatcctcaagggcagcaatcggagccagtgtctagaggaccacacctgggcacctccctttcccatctgcaaaagtagggactgtgaccctcctgggaatccagttcatggctattttgaaggaaataacttcaccttaggatccaccattagttattactgtgaagacaggtactacttagtgggcgtgcaggagcagcaatgcgttgatggggagtggagcagtgcacttccagtctgcaagttgatccaggaagctcccaaaccagagtgtgagaaggcacttcttgcctttcaggagagtaagaacctctgcgaagccatggagaactttatgcaacaattaaaggaaagtggcatgacaatggaggagctaaaatattctctggagctgaagaaagctgagttgaaggcaaaattgttgtaacactacagctgagcagatgtaatagaaataaacctatgaataaattttcttcttggttctgaaaaaaaaaaaaaaaaaa

SEQ ID NO: 87 - DNA, 3689 bp, Homo sapiens
agttaaaaccaacctctcctgccctgagtggataggtagggttagggttgccagatgtcacgaagttacaggatgctcagttttaaggtatatcccttatactataagggttatagtaaaaaatattcattatgtgaaattcaaatataactgggtatcaggtattctatgtggcaaccctaggtaggggagcacaggttaggcaagcgattagaagatttgcagcctccaaagtttctgcacctcgatgggacactagaacaggaaggctcctgggcctttctggctctgggaatgaagcgtggaaaaccctccttaggcgggcgcagtgcttcaagtagccaagctctgacttccgagggaagaaaggaggccatgggcctctgccagagccatgctctgcactctggggtcagcagagttcaaaacgacctgcaacgtctggcgcttagctcctaaagaggtctccagtccagcgccgacggccagcggctagaggccgtccgcccgactccaagatggcgcccgccacagctgccaggtgttaagatggcggcgcggggccgcgcccgcgctcccaggctctcctcccccagccttcctccggctggcagcacgactcgcgtagccgtgcgccgattgcctctcggcctgggcaatggtcccggctgccggtcgacgaccgccccgcgtcatgcggctcctcggctggtggcaagtattgctgtgggtgctgggacttcccgtccgcggcgtggaggttgcagaggaaagtggtcgcttatggtcagaggagcagcctgctcaccctctccaggtgggggctgtgtacctgggtgaggaggagctcctgcatgacccgatgggccaggacagggcagcagaagaggccaatgcggtgctggggctggacacccaaggcgatcacatggtgatgctgtctgtgattcctggggaagctgaggacaaagtgagttcagagcctagcggcgtcacctgtggtgctggaggagcggaggactcaaggtgcaacgtccgagagagccttttctctctggatggcgctggagcacacttccctgacagagaagaggagtattacacagagccagaagtggcggaatctgacgcagccccgacagaggactccaataacactgaaagtctgaaatccccaaaggtgaactgtgaggagagaaacattacaggattagaaaatttcactctgaaaattttaaatatgtcacaggaccttatggattttctgaacccaaacggtagtgactgtactctagtcctgttttacaccccgtggtgccgcttttctgccagtttggcccctcactttaactctctgccccgggcatttccagctcttcactttttggcactggatgcatctcagcacagcagcctttctaccaggtttggcaccgtagctgttcctaatattttattatttcaaggagctaaaccaatggccagatttaatcatacagatcgaacactggaaacactgaaaatcttcatttttaatcagacaggtatagaagccaagaagaatgtggtggtaactcaagccgaccaaataggccctcttcccagcactttgataaaaagtgtggactggttgcttgtattttccttattctttttaattagttttattatgtatgctaccattcgaactgagagtattcggtggctaattccaggacaagagcaggaacatgtggagtagtgatggtctgaaagaagttggaaagaggaacttcaatccttcgtttcagaaattagtgctacagtttcatacattttctccagtgacgtgttgacttgaaacttcaggcagattaaaagaatcatttgttgaacaactgaatgtataaaaaaattataaactggtgttttaactagtattgcaataagcaaatgcaaaaatattcaatagatgcactattcttgtttttactgcatgaacgtaatccagtatttggaaagtaatccagtttgaaatgtgaagatgtattccggcagaatagtgagtagaatgacatgcttactatacagaaggcaaaaataggactctcaggtaatagtttaaggaaacccttgattccttatatatgtttaagaaggttagttttctgtttctttgcagtttttcttctagagtccatagcaggaaagtatgtaaccagaattggttagtgtgaccccctcaagtagcaagtgatggaaaataagagtcaaataccttgatgtttgtgatctctaactcaaaaaatttgaagtgttttaagttgtttctgggtaagggagatgttaggagaaaggaaatgctgtaactaaagctcaattattatcagttctatgctaacgtatacattttaatcatagttacctaagcagcatgcattaattgaaccttaaaatgttcccagcaggctgggcgcagtggctcatgcctgtaatcccagcactttgggaggccaaggcgggaggatcacttgaggttaggacttttgagaccagcctggccaacttggtgaaaccctctctctactaaaaatacaaaaaattagctgggcgtggtggcgggcacctgtaatcccagctacttgggaaagctgaggcatgagaatcacttgaacccgggaggcagaggttgcagtgagctgagatcatgccactgcactccagcctgtgcaaccagagcgaaactccatctcaaaaacaaacaaaaagaagtattgaagtgtaaaacactgttcttgcccacaagttgattctagtctagttcaagacacatgtttagtaaagagacaacatgtaatttaaacaaactttttttttttttttagacaaagtctcactctgtcacctaggctggagtgcaatggtgcaatcttggctcactgcaacctctgcttcccgggttcaagcgattctccagcctcagcctcctgagtagctgggactatgggcctgtgccatcacacccagctaatttttctatttttagtagagatggggttttgccatgttggccaggctggtctcaaactgctgacttcaggtgatccacccgcctcagcctcccaaagtgttgggattacaggtgtgagccactgcgcctggcctaaacaaactttttgaaaagctgtttctaaaagattccttaaattcagatatgacagctaattacctcatcataaattacttttatactaattgtttccagggttttagagtagttgaatgtttatttcacaaggcaccctaaattctatagaaataaaacctcagatgagtctccttcttagagtgttacaatgaatgggagtttacaacttttatgtgtcatgtttccaacagctgtgtttggggtggtcactggcaggaggggaccgtatctcagaatggcacattatttctattttacacatgagcaaattgaggcatagagagttagataacttgcccaggttacacagattgtaagttgatgaagctgggatttgaatcttcacatgtgtgtacttataaatacaaatgtaaggaaaactctagtgagtccacctcttatattgagttattactgtgtgagtgccaagtactgttttagatgctttacatatactattttgtttaatatcctttttaaagaataaactaggttggtgcag

SEQ ID NO: 88 - DNA, 3144 bp, Homo sapiens
cagaacccaagggcttacctgtgctctgtgattccccaactagggatttagttgtagccacggacctggtaggcaacagggaggggattttaatctgctccttgcatcagaaggtccaataggcagggttagtataatgggagatgccctggtagggctggcaaggagaagaagccacatgtattttggtctgatgaaaagcagcagtgatctgtcactgaccaaaatggtcccccaactatgcattacggagcagcaacccacatacagaactcgagaagccacggcctggagactgtacctggacaccaaagactggagagaggagctggtggggaaaccccagagttcccagggtgccactccccagctccaccagagaactttgggaatgagctgctgcccctgagtgcccctctccagggcctcagtgagggtctctaccctccagggaggaacaaaaccttgccagctggggtcctgcgagagggggcagttcaattcctccacaggggactctgcaactccaatctttcgagtgaagcatctgcgaggccctcagggacccaggatgaactgcatagcagcagaaggaagacaggccagaccaggcgggagggagcccggaaacatctggtttgtagtttcagactctacccgttcacagttcacacagtctcaccgggaaactcacaccttgccctgtaccaagtttttaaggcagttaagctctgcccatccgagacttcatttttcttgagtagaaaatcactgaaatcatcagatccatggcacccaccttcactttctcctaacagctggaaccgtcaggctggcttcagggcctggtcttcgcacttgatatcactatccctcacctgctcagacagccagagcaggcgggtgagttcctcccaacaacctccactgcattctctcagctcccaccgcagggcagcccacgtgcctgagtgaacatgtgtgcgtgtgcacacacgcaagtatgcacagacatacactaaacacgaacatacagtgcacatgaacgctgctcccagctagggccctctggtcagactgctgcctgggttagaattcttgtccccacccccacttactatagttctgtgatcctggacaagtaactgaatctctccgtgccacagtttcttcttgtagaaaacgggaaagttcacagtacttacctccttagagtcattgtgaaggtcagtttgaggcatcacaaatttaaggcacccagacataagggtcaacagggttagctatcactgtccagtttggtgggaggaactgaatgcatgtaggcacatggacccagtctacactcaggcacaaaaggagctacattagttacattcaggcataccccagagcactacaattctctgagacattgtctggaaatctagaaatcatctccttgccctttaaggtattttaaccctcgcattcctctgcttttccaagaatgtgaatcttgccaagctgtccgtgagagacacgggctcccctcgagggagacttgcaaatgctccataaacagccacagtgtggggctctgccatgaggaagtcacagcagacacgctagacagcatagtcctggatgcaacctggaggaagggaggcccatggtggagcactcactccgtgcctgtctgcccggtgagacctcaagttccttgcagacaaaggccatgggttgttggctcttgtgttcccggtggcctttccagagctgaacagaggacagatgcacagacgggggggctctggtggtcaaggcagcagtccccttggatactaaagtctgagccaggcccctcaggcccggcatgggcagtgcgaggcccatagtggtgggaagccagttggccagctggggtgagaaggccgcgaagccatgggcagacaggaagtggaggtgaatgtctctgcctcctgtaggcctcagcagggacagcacagaccctctggctggggcagcgcagaccctctagctggggcagaacaaggctggtgcttccttctagtccttgagactttgtagctctaactcaagcagaaccctggggttttgggattctgtgtggtgactgctgaggaaggtttatggatttgacagggtgcatgtcacagagagacagttctcagtcagcacttcctgtcccctgcagaggctcataggggacagcccctgccaaggagaccctggaggggctctgaggatagcaatcagaggttgggctggctggactgagcccaggcctgttgcccaccaagtctccataggttctagtctgacccctctctccacccctgggctatgcaggccagcccgtgcagaccacccccgacgcgtccacttgcaacacccgcctcactgtgccaacactccatccacacaggaaaggactgagaacgtgatgcttaacccaaaggagtgagtttcataggatgggtggctttaacagtttcacagcaggacactgagggaatatttccctatcccttcaaatggacggtcactacagaaacgtgtagagcaagactttgtcaaggggctgtttccaggtctcccggtgtctaaatagcagagctggaatgggaactgagaaccgattctttccacaaccgcccactgagcagcaaggctgcagccagcaaagaggtgcggaggcaagcaagctccatgtggtggggacagcgcattgcgacctccaccacccctgcagtgggctgccagctgagccacctgtcttccactgtatctactgtacgaacttctccagctctgctctgttttctcttcctcagcatccaccccgtgacacgtagtggtggctgatgtcgccacagtaccatgaggttaacaggtcctccctccagcttccctcatggtggcagcctaacctgcattgcagccgttcaccggacaccgcaccagaccctcaaaacccatccaagactgtgggaggagtaaacaacccagcccagttaagaggagatgccgaatttaatgaaccctatttgaattgcagggctgtgattcctcttacctttaacgtgaactcacaggcggattaaagtgaaataaaacctaccatttgagttaaaaaaaaaa

SEQ ID NO: 89 - DNA, 1496 bp, Homo sapiens
gtgccctgcagcgcgtggacaggctaggggtcgcgggagcgggagggaggcgctgccgggcctgtcgcgcaaggacgtcggtcctcccaggtttgagggcggtcaggcggggtcaaggccaggcagcggggcgcgtctgcgttgcgcccgactctccgcggttacctgtgcctagaggtgatttgaagggcaggggccgagagattcgtagccctgctgcggcgccgtcccggagttccccggcccagaccagacccgcggggcgccctcagcagcccgcccgtcttgcactcggagagcggtcctggcaggaaggccggccagtgtgcacccggttcgggcccctgcgcccgggctggcaagatggccacgcccccagcagagacggcgcctctaggacaccatcggggaccgaggaccagctttatccagggactctaccattcccacccctttggccccactccacgacaaccacttccccatcttctcctctattctggtctcccctgcccccacgccttcccacccagcgtcttccccaggttcccccactacctctccctcagatccaggccctcagctcagcatgggtggttctccctccaggaaagggggaggagggaccaggacctgagttgcatagcggctgcctggatgggcttagaagcctttttgagggacctccctgcccctatcctggggcttggatacctttccaagtccctggaactgcccacccttcccctgccaccccgtcaggagatcctagtatggaggaacatctgtctgtcatgtatgagagactgagacaagagcttcccaagctcttccttcagtcccacgactacagtctgtattccttggatgtggaattcatcaatgagatcctcaacatacgtaccaagggccggacatggtacattctttcactgaccctctgccgtttcctggcctggaattattttgcacaccttcgtttggaggttttacagctgacccgccaccctgagaactggaccctgcaagcccggtggcggcttgtggggctgcccgtccacttgctctttttgcggttctacaagcgtgacaaagacgagcattaccggacctatgatgcctactccactttctacctgaattccagtggcctcatttgtcgccatcgtctagataaactgatgccttcacactcacctccaacgcctgtgaagaagctgctagtgggagccctggtggccctggggctgtcagagccagaacctgacttaaacctgtgttccaagccctgatccttgaccttggagtggaggcagcactgaagactgctacgcccaagagaaggaggtggaggcagccaagaatctcaggagccagcttcctctcctcgtttctctccttccttcctttccatctcatgctgtgtaaagctgctgtgtaatttaacttgtaaataataaagtttaactgactatatgaaaaaaaaaaaaaaaaaa

SEQ ID NO: 90 - DNA, 1608 bp, Homo sapiens
agttcgccgcttgcaccgggaccgatgccatctgagacgcacgcgatgctggcgacgctggcgagggtggcagctctgcgcagaacctgcctcttctccggccggggcggcgggagggggctgtggactggccgcccgcagtcagatatgaacaatataaagccattggaaggggtaaaaattctggatctaacaagagtcctggcgggaccttttgctactatgaatttaggagatcttggagcagaagttataaaagtggagagaccaggagctggtgatgatacacgaacttgggggccaccttttgttgggacagaaagtacatattatctcagtgttaaccgaaataaaaaaagtattgctgttaatatcaaggatccaaaaggggtgaaaatcatctattgttccatcacagggtatggtcagacaggtccaatttctcagcgagctggttatgatgctgttgcctcggctgtttctggtctgatgcacatcacagggcctgagaatggagatccagttcgcccaggagtagctatgactgatcttgccactggcctgtatgcatatggagctattatggctggattgatacaaaaatacaaaactgggaaaggactgttcattgattgtaacctgctgtcatcccaggtggcgtgtttgtctcacatagctgcaaattatcttattggtcaaaaggaagcaaaacgttggggtacagctcatggcagtatcgttccttaccaggcttttaaaaccaaggatggctatattgtagttggagcaggaaataaccagcagtttgccaccgtctgcaagatcttggatttgcctgagttgattgataattccaagtataaaactaaccaccttcgggtacacaatagaaaagagcttattaaaatattatctgaacggtttgaagaagaactgaccagcaagtggttatatctttttgaaggcagtggagtcccgtatggcccaatcaacaacatgaagaatgtatttgcagaacctcagaacgctgtctctggcttccaaagcctgctgcattccttggcccatggccccttccttcatcttcaaggatcagcaagggtattacacaatggcctcgttatggagatggagcatccaactgtggggaagatttccgtcccaggcccagctgtgagatacagtaagttcaagatgtcagaggccaggccgccccccctgctcgggcagcacacaacgcacatcctgaaggaggtcctgagatacgatgacagggccatcggggagctgctcagcgctggagtggtggaccaacatgaaactcactgacaaaggaaaagggctcttcctcataacctcgatccgaatacactggcaaaggcaacactttgcttggacccttctccccagttctgataccactaagaagaagatttagagtaactccagatttcttacatggcatctccagaatggctctggtattaatgaatctagtgccttttaaatgtatcccacgttttgttccctaccatcttttttttcagatgatgatttcattatggatttgtgggatttttaaaaataaagatttaatttttttcctgg

SEQ ID NO: 91 - DNA, 3246 bp, Homo sapiens
tgcggtgcctgcgcccgcggcggcggaggcgcaggcggtggcgagtggatatctccggagcatttggataatgtgacagttggaatgcagtgatgtcgactctttgcccaccgccatctccagctgttgccaagacagagattgctttaagtggcaaatcacctttattagcagctacttttgcttactgggacaatattcttggtcctagagtaaggcacatttgggctccaaagacagaacaggtacttctcagtgatggagaaataacttttcttgccaaccacactctaaatggagaaatccttcgaaatgcagagagtggtgctatagatgtaaagttttttgtcttgtctgaaaagggagtgattattgtttcattaatctttgatggaaactggaatggggatcgcagcacatatggactatcaattatacttccacagacagaacttagtttctacctcccacttcatagagtgtgtgttgatagattaacacatataatccggaaaggaagaatatggatgcataaggaaagacaagaaaatgtccagaagattatcttagaaggcacagagagaatggaagatcagggtcagagtattattccaatgcttactggagaagtgattcctgtaatggaactgctttcatctatgaaatcacacagtgttcctgaagaaatagatatagctgatacagtactcaatgatgatgatattggtgacagctgtcatgaaggctttcttctcaatgccatcagctcacacttgcaaacctgtggctgttccgttgtagtaggtagcagtgcagagaaagtaaataagatagtcagaacattatgcctttttctgactccagcagagagaaaatgctccaggttatgtgaagcagaatcatcatttaaatatgagtcagggctctttgtacaaggcctgctaaaggattcaactggaagctttgtgctgcctttccggcaagtcatgtatgctccatatcccaccacacacatagatgtggatgtcaatactgtgaagcagatgccaccctgtcatgaacatatttataatcagcgtagatacatgagatccgagctgacagccttctggagagccacttcagaagaagacatggctcaggatacgatcatctacactgacgaaagctttactcctgatttgaacatttttcaagatgtcttacacagagacactctagtgaaagccttcctggatcaggtctttcagctgaaacctggcttatctctcagaagtactttccttgcacagtttctacttgtccttcacagaaaagccttgacactaataaaatatatagaagacgatacgcagaagggaaaaaagccctttaaatctcttcggaacctgaagatagaccttgatttaacagcagagggcgatcttaacataataatggctctggctgagaaaattaaaccaggcctacactcttttatctttggaagacctttctacactagtgtgcaagaacgagatgttctaatgactttttaaatgtgtaacttaataagcctattccatcacaatcatgatcgctggtaaagtagctcagtggtgtggggaaacgttcccctggatcatactccagaattctgctctcagcaattgcagttaagtaagttacactacagttctcacaagagcctgtgaggggatgtcaggtgcatcattacattgggtgtctcttttcctagatttatgcttttgggatacagacctatgtttacaatataataaatattattgctatcttttaaagatataataataggatgtaaacttgaccacaactactgtttttttgaaatacatgattcatggtttacatgtgtcaaggtgaaatctgagttggcttttacagatagttgactttctatcttttggcattctttggtgtgtagaattactgtaatacttctgcaatcaactgaaaactagagcctttaaatgatttcaattccacagaaagaaagtgagcttgaacataggatgagctttagaaagaaaattgatcaagcagatgtttaattggaattgattattagatcctactttgtggatttagtccctgggattcagtctgtagaaatgtctaatagttctctatagtccttgttcctggtgaaccacagttagggtgttttgtttattttattgttcttgctattgttgatattctatgtagttgagctctgtaaaaggaaattgtattttatgttttagtaattgttgccaactttttaaattaattttcattatttttgagccaaattgaaatgtgcacctcctgtgccttttttctccttagaaaatctaattacttggaacaagttcagatttcactggtcagtcattttcatcttgttttcttcttgctaagtcttaccatgtacctgctttggcaatcattgcaactctgagattataaaatgccttagagaatatactaactaataagatctttttttcagaaacagaaaatagttccttgagtacttccttcttgcatttctgcctatgtttttgaagttgttgctgtttgcctgcaataggctataaggaatagcaggagaaattttactgaagtgctgttttcctaggtgctactttggcagagctaagttatcttttgttttcttaatgcgtttggaccattttgctggctataaaataactgattaatataattctaacacaatgttgacattgtagttacacaaacacaaataaatattttatttaaaattctggaagtaatataaaagggaaaatatatttataagaaagggataaaggtaatagagcccttctgccccccacccaccaaatttacacaacaaaatgacatgttcgaatgtgaaaggtcataatagctttcccatcatgaatcagaaagatgtggacagcttgatgttttagacaaccactgaactagatgactgttgtactgtagctcagtcatttaaaaaatatataaatactaccttgtagtgtcccatactgtgttttttacatggtagattcttatttaagtgctaactggttattttctttggctggtttattgtactgttatacagaatgtaagttgtacagtgaaataagttattaaagcatgtgtaaacattgttatatatcttttctcctaaatggagaattttgaataaaatatatttgaaattttaaaaaaaaaaaaaaaaaa

SEQ ID NO: 92 - DNA, 5006 bp, Homo sapiens
gctgctgatcacttacaatctgacaacacttacaatctactcagaacaacctctctctctccagcagagagtgtcacctcctgctttaggaccatcaagctctgctaactgaatctcatcctaattgcaggatcacattgcaaagctttcactctttcccaccttgcttgtgggtaaatctcttctgcggaatctcagaaagtaaagttccatcctgagaatatttcacaaagaatttccttaagagctggactgggtcttgacccctgaatttaagaaattcttaaagacaatgtcaaatatgatccaagagaaaatgtgatttgagactggagacaattgtgcatatcgtctaataataaaaacccatactagcctatagaaaacaatatttgaaagattgctaccactaaaaagaaaactactacaacttgacaagactgctgcaaacttcaatttgtcaaccacaacttgacaaggttgctataaaacaagattgctacaacttctagtttatgttatacagcatatttcattttggcttaatgatggagaaaaagtgtaccctgtattttctggttctcttgcctttttttatgattcttgttacagcagaattagaagagagtcctgaggactcaattcagttgggagttactagaaataaaatcatgacagctcaatatgaatgttaccaaaagattatgcaagaccccattcaacaagcagaaggcgtttactgcaacagaacctgggatggatggctctgctggaacgatgttgcagcaggaactgaatcaatgcagctctgccctgattactttcaggactttgatccatcagaaaaagttacaaagatctgtgaccaagatggaaactggtttagacatccagcaagcaacagaacatggacaaattatacccagtgtaatgttaacacccacgagaaagtgaagactgcactaaatttgttttacctgaccataattggacacggattgtctattgcatcactgcttatctcgcttggcatattcttttatttcaagagcctaagttgccaaaggattaccttacacaaaaatctgttcttctcatttgtttgtaactctgttgtaacaatcattcacctcactgcagtggccaacaaccaggccttagtagccacaaatcctgttagttgcaaagtgtcccagttcattcatctttacctgatgggctgtaattacttttggatgctctgtgaaggcatttacctacacacactcattgtggtggccgtgtttgcagagaagcaacatttaatgtggtattattttcttggctggggatttccactgattcctgcttgtatacatgccattgctagaagcttatattacaatgacaattgctggatcagttctgatacccatctcctctacattatccatggcccaatttgtgctgctttactggtgaatctttttttcttgttaaatattgtacgcgttctcatcaccaagttaaaagttacacaccaagcggaatccaatctgtacatgaaagctgtgagagctactcttatcttggtgccattgcttggcattgaatttgtgctgattccatggcgacctgaaggaaagattgcagaggaggtatatgactacatcatgcacatccttatgcacttccagggtcttttggtctctaccattttctgcttctttaatggagaggttcaagcaattctgagaagaaactggaatcaatacaaaatccaatttggaaacagcttttccaactcagaagctcttcgtagtgcgtcttacacagtgtcaacaatcagtgatggtccaggttatagtcatgactgtcctagtgaacacttaaatggaaaaagcatccatgatattgaaaatgttctcttaaaaccagaaaatttatataattgaaaatagaaggatggttgtctcactgttttgtgcttctcctaactcaaggacttggacccatgactctgtagccagaagacttcaatattaaatgactttttgaatgtcataaagaagagccttcacatgaaattagtagtgtgttgataagagtgtaacatccagctctatgtgggaaaaaagaaatcctggtttgtaatgtttgtcagtaaatactcccactatgcctgatgtgacgctactaacctgacatcaccaagtgtggaattggagaaaagcacaatcaacttttctgagctggtgtaagccagttccagcacaccattgcatgaattcacaaacaaatggctgtaaaactaaacatacatgttgggcatgattctacccttattgccccaagagacctagctaaggtctataaacatgaagggaaaattagcttttagttttaaaactctttatcccatcttgattggggcagttgactttttttttgcccagagtgccgtagtcctttttgtaactaccctctcaaatggacaataccagaagtgaattatccctgctggctttcttttctctatgaaaagcaactgagtacaattgttatgatctactcatttgctgacacatcagttatatcttgtggcatatccattgtggaaactggatgaacaggatgtataatatgcaatcctacttctatatcattaggaaaacatcttagttgatgctacaaaacaccttgtcaacctcttcctgtcttaccaaacagtgggagggaattcctagctgtaaatataaattttgtcccttccatttctactgtataaacaaattagcaatcattttatataaagaaaatcaatgaaggatttcttattttcttggaattttgtaaaaagaaattgtgaaaaatgagcttgtaaatactccattattttattttatagtctcaaatcaaatacatacaacctatgtaatttttaaagcaaatatataatgcaacaatgtgtgtatgttaatatctgatactgtatctgggctgattttttaaataaaatagagtctggaatgctatatttggtaaatattttaaagacaaccagatgccagcatcagaagtctgtttgagaactaagagaacagaaacatctatcataagatatatttattttaaaaacacaaggtcactattttattgaatatatttgttttgataactcataccttaataataggtgtgtttgacatatttcttttttcattttgacaatgaactcacattctaatccagaaattttaaacaactactgtgataaataccaatctgctacttttatagattttaccccattaaaatattactttactgacttttactatgtgaagatatatagctttggaaatgtcccaggctattcaagaaatataaaaaactagaaggatactatatataccatatacaatgctttaatattttaatagagctactgtatataatacaaattagggaaatacttgaatatatcattgagaaaaaattattgtcagatcttactgaattattgtcagactttattaaataaagatagaagaaaaccttgctaatgaattaaagtgaaatttgcatgggattcagtttctctaatgttattttccgctgaaatctctaaagaacaagaatgacttcaattagtaaaagtcaattttgggaaaagtcatgggtatctgttttttaagtgtgtcaatctgattaaaatggatgaaacaaattactcatcataagttgtttcttaagctgtcaatatgtcaatagatggtgagttcagaacttatttcaaattgctaagacaaattatctaaattcgtaagaattaacatatagaatggtctggtcagtacatttataatttatctatgcatgaaaaagtattgttttgtttgaaacatgaatttcatagcaagctgccatagaaaggaacgcaggctgttctagaccttcaactgcctaaattatacaaaaattcattttaataaactcaattattagctatttattattcaaagacccatatttaaatcctttgctgaccatgttgacatatatcagccttcttctagacaaactgtcaactctcaaccatcttgacagtagaagtgacagtaaaaaatgttgaatgatcagagattatattaaaataaacatgtaattttcaagtatttttgttgtgcttttataatattaattctagatcagatttattttatagccagggtttgtctgttgtagagtcttgaggcgtagcagtcattcatgattaatcactgttagttttgtacccatatatttttagaatagttttaaatgttagatttctcaaaagctaaatgctacttaatatctttgtatcatactcataaagcaaagtaaatctgacactttttttaaagcaaacttctttgctgtcaaaaaaataaatttggggaaatttctagcttttaaaatgtagatctgcattttactgtgattacttgtgaaagtcatattttaattttctaaattctaatttgtcattttatttcctaaagttaatttccaatgcatttattcataaaatattcattctggaatgcagtgtttgtttaaatgtaatccaatgtatatagaattagtggtggctgtagtgctgtatttattgcttataattttttttaaatgtgaacttacttttaattttctcttggttttaatctgctagtagaaaccactagttatctgtaaaaatatattcaagatattctgatcaattataacaatttatgttatgcctagagtatatctctattttttgattgtatgaaaatattaaagttatgagttaaagtttattttcactgatatttactacagtgccaaataatctaatttataaacataattcttacagtaatcaatgggatacttctcaaaattaacaaatctcttaacaaaatatatcttttgccctctttaaagtcttcagtaaaccagtaaatgaattcaataaaccaattaagaaaaaaaaaaaa

SEQ ID NO: 93 - DNA, 5233 bp, Homo sapiens
gatttcctgagcatgcctagggaatgacaggcatctccacaggcaggctgcatccaccttggctggggtgtcgtcattggctgcctattagaaaaacgacaggacaatgcataccaccgcctcccgactgtaaacataggggatatgtgttcacttagcatggacttctgggaggggccaaggaagggcggtctggagttttattgaatagagcagtgtgtattcggctgcctgcctgcccgcctgcttgctctctggctgtgctcctgcttaaagaaatcagtccttcctttccgacttagtcctcgggaagaagtttcagactacaaggtatcattggaacatttcaagatcatcaaatcaaattccacagggattggtgaccaaccagaaggctcagacatctgattgctgacctgtccagacatcatctggtctccctgaacctgaaatcacaccatggatgattttgagcgtcgcagagaacttagaaggcaaaagagggaggagatgcgactcgaagcagaaagaatcgcctaccagaggaatgacgatgatgaagaggaggcagcccgggaacggcgccgccgagcccgacaggaacggctgcggcagaagcaggaggaagaatccttgggacaggtgaccgaccaggtggaggtgaatgcccagaacagtgtgcctgacgaggaggccaagacaaccaccacaaacactcaagtggaaggggatgatgaggccgcattcctggagcgcctggctcggcgtgaggaaagacgccaaaaacgccttcaggaggctctggagcggcagaaggagttcgacccaacaataacagatgcaagtctgtcgctcccaagcagaagaatgcaaaatgacacagcagaaaatgaaactaccgagaaggaagaaaaaagtgaaagtcgccaagaaagatacgagatagaggaaacagaaacagtcaccaagtcctaccagaagaatgattggagggatgctgaagaaaacaagaaagaagacaaggaaaaggaggaggaggaagaggagaagccaaagcgagggagcattggagaaaatcaggtagaggtgatggtggaagagaaaacaactgaaagccaggaggaaacagtggtaatgtcattaaaaaatgggcagatcagttcagaagagcctaaacaagaggaggagagggaacaaggttcagatgagatttcccatcatgaaaagatggaagaggaagacaaggaaagagctgaggcagagagggcaaggttggaagcagaagaaagagaaagaattaaagccgagcaagacaaaaagatagcagatgaacgagcaagaattgaagcagaagaaaaagcagctgcccaagaaagagaaaggagagaggcagaagagagggaaaggatgagggaggaagagaaaagggcagcagaggagaggcagaggataaaggaggaagagaaaagggcagcagaggagaggcagaggataaaggaggaagagaaaagggcagcagaggagaggcagaggataaaagaggaagagaaaagggcagcagaggagaggcaaagggccagggcagaggaggaagagaaggctaaggtagaagagcagaaacgtaacaagcagctagaagagaaaaaacatgccatgcaagagacaaagataaaaggggaaaaggtagaacagaaaatagaagggaaatgggtaaatgaaaagaaagcacaagaagataaacttcagacagctgtcctaaagaaacagggagaagagaagggaactaaagtgcaagctaaaagagaaaagctccaagaagacaagcctaccttcaaaaaagaagagatcaaagatgaaaagattaaaaaggacaaagaacccaaagaagaagttaagagcttcatggatcgaaagaagggatttacagaagttaagtcgcagaatggagaattcatgacccacaaacttaaacatactgagaatactttcagccgccctggagggagggccagcgtggacaccaaggaggctgagggcgccccccaggtggaagccggcaaaaggctggaggagcttcgtcgtcgtcgcggggagaccgagagcgaagagttcgagaagctcaaacagaagcagcaggaggcggctttggagctggaggaactcaagaaaaagagggaggagagaaggaaggtcctggaggaggaagagcagaggaggaagcaggaggaagccgatcgaaaactcagagaggaggaagagaagaggaggctaaaggaagagattgaaaggcgaagagcagaagctgctgagaaacgccagaagatgccagaagatggcttgtcagatgacaagaaaccattcaagtgtttcactcctaaaggttcatctctcaagatagaagagcgagcagaatttttgaataagtctgtgcagaaaagcagtggtgtcaaatcgacccatcaagcagcaatagtctccaagattgacagcagactggagcagtataccagtgcaattgagggaacaaaaagcgcaaaacctacaaagccggcagcctcggatcttcctgttcctgctgaaggtgtacgcaacatcaagagtatgtgggagaaagggaatgtgttttcatcccccactgcagcaggcacaccaaataaggaaactgctggcttgaaggtaggggtttctagccgcatcaatgaatggctaactaaaaccccagatggaaacaagtcacctgctcccaaaccttctgacttgagaccaggagacgtatccagcaagcggaacctctgggaaaagcaatctgtggataaggtcacttcccccactaaggtttgagacagttccagaaagaacccaagctcaagacgcaggacgagctcagttgtagagggctaattcgctctgttttgtatttatgttgatttactaaattgggttcattatcttttatttttcaatatcccagtaaacccatgtatattatcactatatttaataatcacagtctagagatgttcatggtaaaagtactgcctttgcacaggagcctgtttctaaagaaacccatgctgtgaaatagagacttttctactgatcatcataactctgtatctgagcagtgataccaaccacatctgaagtcaacagaagatccaagtttaaaattgcctgcggaatgtgtgcagtatctagaaaaatgaaccgtagtttttgtttttttaaatacagaagtcatgttgtttctgcactttataataaagcatggaagaaattatcttagtaggcaattgtaacactttttgaaagtaacccatttcagatttgaaatactgcaataatggttgtctttaaaaaaaaaaaagaaatgtactgttaaggtattactttttttcatgctgatgattcatatctaaattacattattatgttagctgacagtggtactgattttttaggttggttgttttgtggatttctttagtagtgatagtagcctgaaccacattttagataactcaattatgtatgtatgtgcatacacatatacaaacacactaatggtagaatgcttttttatgtgctagactattatatttagtagtatgtcattgtaactagccaatatcacagcttttgaaaaattaaaaaatcacactatattaatatttcatatttgccaacagaaacatggcagataggtatcaatatgttttcaatgcctgatgacctataagaagaaagtattgaaaagaagagagattagaactgttagaaggagttgaaattttctaaaagacatagtatttagtttataattaaatgcattcttgaagtccagtgtgaattttattaatgctatcatctcgaccaagctcaaagcctacttattagaaacaatgaagttcacaataggtcataaggtctcttccttttctaaaattgaaagacaagaaatttagtgccaatattgtacagacagaaattccatgtatgagtctcaacaaagactacctttggctaaatgtctagaagcagagaagtaaagtgagcaaaatccagtgttgaggagtcatgacagtactttgatctttatatactctgaagcatttcttcaaacttttctacttttatttgtcattgatacctgtagtaagttgacaatgtggtgaaatttcaaaattatatgtaacttctactagttttactttctcccccaagtcttttttaactcatgatttttacacacacaatccagaacttattatatagcctctaagtctttattcttcacagtagataatgaaagagtcctccagtgtcttggcaaaatgttctagtatagctggatacatacagtggagttctataaactcatacctcagtggacttaaccaaaattgtgttagtctcaattcctaccacactgagggagcctcccaaataactattttcttatctgcagtattcctccagaagagctaaccagggcagggctggcatgagaagtgacatctgcgttacaaagtctatcttcctcataagtctgtaaagagcaattgaatcttctagctttagcaaacctaagccaaaggaaggaaagccacgaagaatgcagaagtcaaaccctcatgacaaagtaggcacaagtctacaataagctaaatcagaatttacaaatacaagtgtcccaggtagcattgactcccgtcattggagtgaaatggatcaaagtttgaattaaggcctatggtaaggtaacattgctttgttgtacttttgaacaagagctcctcctgatcactattacatatttttctagaaaatctaaagttcagaagagaatgtatcactgctgacttttattccaatatttggatggagtaagttttagggtagaattttgttcagtttggatttaatcttttgaaaagtaaattccttgtttactggtttgactataattctctgttatctttacgaggtaaaactgcaagctgactagcatgttctgtgaatctgccattcctaaaaattttataaacacttgatacttttcactgataatggatcgctccaataaacatatattgtgaaaatgcatccacaataaatggaattccttcctgcaaaatgtctttttctcacttatttttatgtacaatattgatagtgagaggtatgtctattataataaagattatggcacagtaaaaaaaaaaaaaaaaaa

SEQ ID NO: 94 - DNA, 4468 bp, Homo sapiens
gatttcctgagcatgcctagggaatgacaggcatctccacaggcaggctgcatccaccttggctggggtgtcgtcattggctgcctattagaaaaacgacaggacaatgcataccaccgcctcccgactgtaaacataggggatatgtgttcacttagcatggacttctgggaggggccaaggaagggcggtctggagttttattgaatagagcagtgtgtattcggctgcctgcctgcccgcctgcttgctctctggctgtgctcctgcttaaagaaatcagtccttcctttccgacttagtcctcgggaagaagtttcagactacaaggtatcattggaacatttcaagatcatcaaatcaaattccacagggattggtgaccaaccagaaggctcagacatctgattgctgacctgtccagacatcatctggtctccctgaacctgaaatcacaccatggatgattttgagcgtcgcagagaacttagaaggcaaaagagggaggagatgcgactcgaagcagaaagaatcgcctaccagaggaatgacgatgatgaagaggaggcagcccgggaacggcgccgccgagcccgacaggaacggctgcggcagaagcaggaggaagaatccttgggacaggtgaccgaccaggtggaggtgaatgcccagaacagtgtgcctgacgaggaggccaagacaaccaccacaaacactcaagtggaaggggatgatgaggccgcattcctggagcgcctggctcggcgtgaggaaagacgccaaaaacgccttcaggaggctctggagcggcagaaggagttcgacccaacaataacagatgcaagtctgtcgctcccaagcagaagaatgcaaaatgacacagcagaaaatgaaactaccgagaaggaagaaaaaagtgaaagtcgccaagaaagatacgagatagaggaaacagaaacagtcaccaagtcctaccagaagaatgattggagggatgctgaagaaaacaagaaagaagacaaggaaaaggaggaggaggaagaggagaagccaaagcgagggagcattggagaaaatcagatcaaagatgaaaagattaaaaaggacaaagaacccaaagaagaagttaagagcttcatggatcgaaagaagggatttacagaagttaagtcgcagaatggagaattcatgacccacaaacttaaacatactgagaatactttcagccgccctggagggagggccagcgtggacaccaaggaggctgagggcgccccccaggtggaagccggcaaaaggctggaggagcttcgtcgtcgtcgcggggagaccgagagcgaagagttcgagaagctcaaacagaagcagcaggaggcggctttggagctggaggaactcaagaaaaagagggaggagagaaggaaggtcctggaggaggaagagcagaggaggaagcaggaggaagccgatcgaaaactcagagaggaggaagagaagaggaggctaaaggaagagattgaaaggcgaagagcagaagctgctgagaaacgccagaagatgccagaagatggcttgtcagatgacaagaaaccattcaagtgtttcactcctaaaggttcatctctcaagatagaagagcgagcagaatttttgaataagtctgtgcagaaaagcagtggtgtcaaatcgacccatcaagcagcaatagtctccaagattgacagcagactggagcagtataccagtgcaattgagggaacaaaaagcgcaaaacctacaaagccggcagcctcggatcttcctgttcctgctgaaggtgtacgcaacatcaagagtatgtgggagaaagggaatgtgttttcatcccccactgcagcaggcacaccaaataaggaaactgctggcttgaaggtaggggtttctagccgcatcaatgaatggctaactaaaaccccagatggaaacaagtcacctgctcccaaaccttctgacttgagaccaggagacgtatccagcaagcggaacctctgggaaaagcaatctgtggataaggtcacttcccccactaaggtttgagacagttccagaaagaacccaagctcaagacgcaggacgagctcagttgtagagggctaattcgctctgttttgtatttatgttgatttactaaattgggttcattatcttttatttttcaatatcccagtaaacccatgtatattatcactatatttaataatcacagtctagagatgttcatggtaaaagtactgcctttgcacaggagcctgtttctaaagaaacccatgctgtgaaatagagacttttctactgatcatcataactctgtatctgagcagtgataccaaccacatctgaagtcaacagaagatccaagtttaaaattgcctgcggaatgtgtgcagtatctagaaaaatgaaccgtagtttttgtttttttaaatacagaagtcatgttgtttctgcactttataataaagcatggaagaaattatcttagtaggcaattgtaacactttttgaaagtaacccatttcagatttgaaatactgcaataatggttgtctttaaaaaaaaaaaagaaatgtactgttaaggtattactttttttcatgctgatgattcatatctaaattacattattatgttagctgacagtggtactgattttttaggttggttgttttgtggatttctttagtagtgatagtagcctgaaccacattttagataactcaattatgtatgtatgtgcatacacatatacaaacacactaatggtagaatgcttttttatgtgctagactattatatttagtagtatgtcattgtaactagccaatatcacagcttttgaaaaattaaaaaatcacactatattaatatttcatatttgccaacagaaacatggcagataggtatcaatatgttttcaatgcctgatgacctataagaagaaagtattgaaaagaagagagattagaactgttagaaggagttgaaattttctaaaagacatagtatttagtttataattaaatgcattcttgaagtccagtgtgaattttattaatgctatcatctcgaccaagctcaaagcctacttattagaaacaatgaagttcacaataggtcataaggtctcttccttttctaaaattgaaagacaagaaatttagtgccaatattgtacagacagaaattccatgtatgagtctcaacaaagactacctttggctaaatgtctagaagcagagaagtaaagtgagcaaaatccagtgttgaggagtcatgacagtactttgatctttatatactctgaagcatttcttcaaacttttctacttttatttgtcattgatacctgtagtaagttgacaatgtggtgaaatttcaaaattatatgtaacttctactagttttactttctcccccaagtcttttttaactcatgatttttacacacacaatccagaacttattatatagcctctaagtctttattcttcacagtagataatgaaagagtcctccagtgtcttggcaaaatgttctagtatagctggatacatacagtggagttctataaactcatacctcagtggacttaaccaaaattgtgttagtctcaattcctaccacactgagggagcctcccaaataactattttcttatctgcagtattcctccagaagagctaaccagggcagggctggcatgagaagtgacatctgcgttacaaagtctatcttcctcataagtctgtaaagagcaattgaatcttctagctttagcaaacctaagccaaaggaaggaaagccacgaagaatgcagaagtcaaaccctcatgacaaagtaggcacaagtctacaataagctaaatcagaatttacaaatacaagtgtcccaggtagcattgactcccgtcattggagtgaaatggatcaaagtttgaattaaggcctatggtaaggtaacattgctttgttgtacttttgaacaagagctcctcctgatcactattacatatttttctagaaaatctaaagttcagaagagaatgtatcactgctgacttttattccaatatttggatggagtaagttttagggtagaattttgttcagtttggatttaatcttttgaaaagtaaattccttgtttactggtttgactataattctctgttatctttacgaggtaaaactgcaagctgactagcatgttctgtgaatctgccattcctaaaaattttataaacacttgatacttttcactgataatggatcgctccaataaacatatattgtgaaaatgcatccacaataaatggaattccttcctgcaaaatgtctttttctcacttatttttatgtacaatattgatagtgagaggtatgtctattataataaagattatggcacagtaaaaaaaaaaaaaaaaaa

SEQ ID NO: 95 - DNA, 4546 bp, Homo sapiens
gatttcctgagcatgcctagggaatgacaggcatctccacaggcaggctgcatccaccttggctggggtgtcgtcattggctgcctattagaaaaacgacaggacaatgcataccaccgcctcccgactgtaaacataggggatatgtgttcacttagcatggacttctgggaggggccaaggaagggcggtctggagttttattgaatagagcagtgtgtattcggctgcctgcctgcccgcctgcttgctctctggctgtgctcctgcttaaagaaatcagtccttcctttccgacttagtcctcgggaagaagtttcagactacaaggtatcattggaacatttcaagatcatcaaatcaaattccacagggattggtgaccaaccagaaggctcagacatctgattgctgacctgtccagacatcatctggtctccctgaacctgaaatcacaccatggatgattttgagcgtcgcagagaacttagaaggcaaaagagggaggagatgcgactcgaagcagaaagaatcgcctaccagaggaatgacgatgatgaagaggaggcagcccgggaacggcgccgccgagcccgacaggaacggctgcggcagaagcaggaggaagaatccttgggacaggtgaccgaccaggtggaggtgaatgcccagaacagtgtgcctgacgaggaggccaagacaaccaccacaaacactcaagtggaaggggatgatgaggccgcattcctggagcgcctggctcggcgtgaggaaagacgccaaaaacgccttcaggaggctctggagcggcagaaggagttcgacccaacaataacagatgcaagtctgtcgctcccaagcagaagaatgcaaaatgacacagcagaaaatgaaactaccgagaaggaagaaaaaagtgaaagtcgccaagaaagatacgagatagaggaaacagaaacagtcaccaagtcctaccagaagaatgattggagggatgctgaagaaaacaagaaagaagacaaggaaaaggaggaggaggaagaggagaagccaaagcgagggagcattggagaaaatcagggagaagagaagggaactaaagtgcaagctaaaagagaaaagctccaagaagacaagcctaccttcaaaaaagaagagatcaaagatgaaaagattaaaaaggacaaagaacccaaagaagaagttaagagcttcatggatcgaaagaagggatttacagaagttaagtcgcagaatggagaattcatgacccacaaacttaaacatactgagaatactttcagccgccctggagggagggccagcgtggacaccaaggaggctgagggcgccccccaggtggaagccggcaaaaggctggaggagcttcgtcgtcgtcgcggggagaccgagagcgaagagttcgagaagctcaaacagaagcagcaggaggcggctttggagctggaggaactcaagaaaaagagggaggagagaaggaaggtcctggaggaggaagagcagaggaggaagcaggaggaagccgatcgaaaactcagagaggaggaagagaagaggaggctaaaggaagagattgaaaggcgaagagcagaagctgctgagaaacgccagaagatgccagaagatggcttgtcagatgacaagaaaccattcaagtgtttcactcctaaaggttcatctctcaagatagaagagcgagcagaatttttgaataagtctgtgcagaaaagcagtggtgtcaaatcgacccatcaagcagcaatagtctccaagattgacagcagactggagcagtataccagtgcaattgagggaacaaaaagcgcaaaacctacaaagccggcagcctcggatcttcctgttcctgctgaaggtgtacgcaacatcaagagtatgtgggagaaagggaatgtgttttcatcccccactgcagcaggcacaccaaataaggaaactgctggcttgaaggtaggggtttctagccgcatcaatgaatggctaactaaaaccccagatggaaacaagtcacctgctcccaaaccttctgacttgagaccaggagacgtatccagcaagcggaacctctgggaaaagcaatctgtggataaggtcacttcccccactaaggtttgagacagttccagaaagaacccaagctcaagacgcaggacgagctcagttgtagagggctaattcgctctgttttgtatttatgttgatttactaaattgggttcattatcttttatttttcaatatcccagtaaacccatgtatattatcactatatttaataatcacagtctagagatgttcatggtaaaagtactgcctttgcacaggagcctgtttctaaagaaacccatgctgtgaaatagagacttttctactgatcatcataactctgtatctgagcagtgataccaaccacatctgaagtcaacagaagatccaagtttaaaattgcctgcggaatgtgtgcagtatctagaaaaatgaaccgtagtttttgtttttttaaatacagaagtcatgttgtttctgcactttataataaagcatggaagaaattatcttagtaggcaattgtaacactttttgaaagtaacccatttcagatttgaaatactgcaataatggttgtctttaaaaaaaaaaaagaaatgtactgttaaggtattactttttttcatgctgatgattcatatctaaattacattattatgttagctgacagtggtactgattttttaggttggttgttttgtggatttctttagtagtgatagtagcctgaaccacattttagataactcaattatgtatgtatgtgcatacacatatacaaacacactaatggtagaatgcttttttatgtgctagactattatatttagtagtatgtcattgtaactagccaatatcacagcttttgaaaaattaaaaaatcacactatattaatatttcatatttgccaacagaaacatggcagataggtatcaatatgttttcaatgcctgatgacctataagaagaaagtattgaaaagaagagagattagaactgttagaaggagttgaaattttctaaaagacatagtatttagtttataattaaatgcattcttgaagtccagtgtgaattttattaatgctatcatctcgaccaagctcaaagcctacttattagaaacaatgaagttcacaataggtcataaggtctcttccttttctaaaattgaaagacaagaaatttagtgccaatattgtacagacagaaattccatgtatgagtctcaacaaagactacctttggctaaatgtctagaagcagagaagtaaagtgagcaaaatccagtgttgaggagtcatgacagtactttgatctttatatactctgaagcatttcttcaaacttttctacttttatttgtcattgatacctgtagtaagttgacaatgtggtgaaatttcaaaattatatgtaacttctactagttttactttctcccccaagtcttttttaactcatgatttttacacacacaatccagaacttattatatagcctctaagtctttattcttcacagtagataatgaaagagtcctccagtgtcttggcaaaatgttctagtatagctggatacatacagtggagttctataaactcatacctcagtggacttaaccaaaattgtgttagtctcaattcctaccacactgagggagcctcccaaataactattttcttatctgcagtattcctccagaagagctaaccagggcagggctggcatgagaagtgacatctgcgttacaaagtctatcttcctcataagtctgtaaagagcaattgaatcttctagctttagcaaacctaagccaaaggaaggaaagccacgaagaatgcagaagtcaaaccctcatgacaaagtaggcacaagtctacaataagctaaatcagaatttacaaatacaagtgtcccaggtagcattgactcccgtcattggagtgaaatggatcaaagtttgaattaaggcctatggtaaggtaacattgctttgttgtacttttgaacaagagctcctcctgatcactattacatatttttctagaaaatctaaagttcagaagagaatgtatcactgctgacttttattccaatatttggatggagtaagttttagggtagaattttgttcagtttggatttaatcttttgaaaagtaaattccttgtttactggtttgactataattctctgttatctttacgaggtaaaactgcaagctgactagcatgttctgtgaatctgccattcctaaaaattttataaacacttgatacttttcactgataatggatcgctccaataaacatatattgtgaaaatgcatccacaataaatggaattccttcctgcaaaatgtctttttctcacttatttttatgtacaatattgatagtgagaggtatgtctattataataaagattatggcacagtaaaaaaaaaaaaaaaaaa

SEQ ID NO: 96 - DNA, 4282 bp, Homo sapiens
gggaggagtagatttggctgaggacaagcccagactttcgtcacagggacagaccaacgtgttaacacaaagggagaacacgggagcatcctgcaccgtgcatttcagccacagatcacatggcccctccgcgggcccagcccacgccctgaccgcccggcctggccaggtctccgtatctctctgccccgccgccccttcccaactgcggacatgctgggtggatccggatcgcatggaagacgcagcctggccgcgctctcccaaatcgcctaccagaggaatgacgatgatgaagaggaggcagcccgggaacggcgccgccgagcccgacaggaacggctgcggcagaagcaggaggaagaatccttgggacaggtgaccgaccaggtggaggtgaatgcccagaacagtgtgcctgacgaggaggccaagacaaccaccacaaacactcaagtggaaggggatgatgaggccgcattcctggagcgcctggctcggcgtgaggaaagacgccaaaaacgccttcaggaggctctggagcggcagaaggagttcgacccaacaataacagatgcaagtctgtcgctcccaagcagaagaatgcaaaatgacacagcagaaaatgaaactaccgagaaggaagaaaaaagtgaaagtcgccaagaaagatacgagatagaggaaacagaaacagtcaccaagtcctaccagaagaatgattggagggatgctgaagaaaacaagaaagaagacaaggaaaaggaggaggaggaagaggagaagccaaagcgagggagcattggagaaaatcagggagaagagaagggaactaaagtgcaagctaaaagagaaaagctccaagaagacaagcctaccttcaaaaaagaagagatcaaagatgaaaagattaaaaaggacaaagaacccaaagaagaagttaagagcttcatggatcgaaagaagggatttacagaagttaagtcgcagaatggagaattcatgacccacaaacttaaacatactgagaatactttcagccgccctggagggagggccagcgtggacaccaaggaggctgagggcgccccccaggtggaagccggcaaaaggctggaggagcttcgtcgtcgtcgcggggagaccgagagcgaagagttcgagaagctcaaacagaagcagcaggaggcggctttggagctggaggaactcaagaaaaagagggaggagagaaggaaggtcctggaggaggaagagcagaggaggaagcaggaggaagccgatcgaaaactcagagaggaggaagagaagaggaggctaaaggaagagattgaaaggcgaagagcagaagctgctgagaaacgccagaagatgccagaagatggcttgtcagatgacaagaaaccattcaagtgtttcactcctaaaggttcatctctcaagatagaagagcgagcagaatttttgaataagtctgtgcagaaaagcagtggtgtcaaatcgacccatcaagcagcaatagtctccaagattgacagcagactggagcagtataccagtgcaattgagggaacaaaaagcgcaaaacctacaaagccggcagcctcggatcttcctgttcctgctgaaggtgtacgcaacatcaagagtatgtgggagaaagggaatgtgttttcatcccccactgcagcaggcacaccaaataaggaaactgctggcttgaaggtaggggtttctagccgcatcaatgaatggctaactaaaaccccagatggaaacaagtcacctgctcccaaaccttctgacttgagaccaggagacgtatccagcaagcggaacctctgggaaaagcaatctgtggataaggtcacttcccccactaaggtttgagacagttccagaaagaacccaagctcaagacgcaggacgagctcagttgtagagggctaattcgctctgttttgtatttatgttgatttactaaattgggttcattatcttttatttttcaatatcccagtaaacccatgtatattatcactatatttaataatcacagtctagagatgttcatggtaaaagtactgcctttgcacaggagcctgtttctaaagaaacccatgctgtgaaatagagacttttctactgatcatcataactctgtatctgagcagtgataccaaccacatctgaagtcaacagaagatccaagtttaaaattgcctgcggaatgtgtgcagtatctagaaaaatgaaccgtagtttttgtttttttaaatacagaagtcatgttgtttctgcactttataataaagcatggaagaaattatcttagtaggcaattgtaacactttttgaaagtaacccatttcagatttgaaatactgcaataatggttgtctttaaaaaaaaaaaagaaatgtactgttaaggtattactttttttcatgctgatgattcatatctaaattacattattatgttagctgacagtggtactgattttttaggttggttgttttgtggatttctttagtagtgatagtagcctgaaccacattttagataactcaattatgtatgtatgtgcatacacatatacaaacacactaatggtagaatgcttttttatgtgctagactattatatttagtagtatgtcattgtaactagccaatatcacagcttttgaaaaattaaaaaatcacactatattaatatttcatatttgccaacagaaacatggcagataggtatcaatatgttttcaatgcctgatgacctataagaagaaagtattgaaaagaagagagattagaactgttagaaggagttgaaattttctaaaagacatagtatttagtttataattaaatgcattcttgaagtccagtgtgaattttattaatgctatcatctcgaccaagctcaaagcctacttattagaaacaatgaagttcacaataggtcataaggtctcttccttttctaaaattgaaagacaagaaatttagtgccaatattgtacagacagaaattccatgtatgagtctcaacaaagactacctttggctaaatgtctagaagcagagaagtaaagtgagcaaaatccagtgttgaggagtcatgacagtactttgatctttatatactctgaagcatttcttcaaacttttctacttttatttgtcattgatacctgtagtaagttgacaatgtggtgaaatttcaaaattatatgtaacttctactagttttactttctcccccaagtcttttttaactcatgatttttacacacacaatccagaacttattatatagcctctaagtctttattcttcacagtagataatgaaagagtcctccagtgtcttggcaaaatgttctagtatagctggatacatacagtggagttctataaactcatacctcagtggacttaaccaaaattgtgttagtctcaattcctaccacactgagggagcctcccaaataactattttcttatctgcagtattcctccagaagagctaaccagggcagggctggcatgagaagtgacatctgcgttacaaagtctatcttcctcataagtctgtaaagagcaattgaatcttctagctttagcaaacctaagccaaaggaaggaaagccacgaagaatgcagaagtcaaaccctcatgacaaagtaggcacaagtctacaataagctaaatcagaatttacaaatacaagtgtcccaggtagcattgactcccgtcattggagtgaaatggatcaaagtttgaattaaggcctatggtaaggtaacattgctttgttgtacttttgaacaagagctcctcctgatcactattacatatttttctagaaaatctaaagttcagaagagaatgtatcactgctgacttttattccaatatttggatggagtaagttttagggtagaattttgttcagtttggatttaatcttttgaaaagtaaattccttgtttactggtttgactataattctctgttatctttacgaggtaaaactgcaagctgactagcatgttctgtgaatctgccattcctaaaaattttataaacacttgatacttttcactgataatggatcgctccaataaacatatattgtgaaaatgcatccacaataaatggaattccttcctgcaaaatgtctttttctcacttatttttatgtacaatattgatagtgagaggtatgtctattataataaagattatggcacagtaaaaaaaaaaaaaaaaaa

SEQ ID NO: 97 - DNA, 4204 bp, Homo sapiens
gggaggagtagatttggctgaggacaagcccagactttcgtcacagggacagaccaacgtgttaacacaaagggagaacacgggagcatcctgcaccgtgcatttcagccacagatcacatggcccctccgcgggcccagcccacgccctgaccgcccggcctggccaggtctccgtatctctctgccccgccgccccttcccaactgcggacatgctgggtggatccggatcgcatggaagacgcagcctggccgcgctctcccaaatcgcctaccagaggaatgacgatgatgaagaggaggcagcccgggaacggcgccgccgagcccgacaggaacggctgcggcagaagcaggaggaagaatccttgggacaggtgaccgaccaggtggaggtgaatgcccagaacagtgtgcctgacgaggaggccaagacaaccaccacaaacactcaagtggaaggggatgatgaggccgcattcctggagcgcctggctcggcgtgaggaaagacgccaaaaacgccttcaggaggctctggagcggcagaaggagttcgacccaacaataacagatgcaagtctgtcgctcccaagcagaagaatgcaaaatgacacagcagaaaatgaaactaccgagaaggaagaaaaaagtgaaagtcgccaagaaagatacgagatagaggaaacagaaacagtcaccaagtcctaccagaagaatgattggagggatgctgaagaaaacaagaaagaagacaaggaaaaggaggaggaggaagaggagaagccaaagcgagggagcattggagaaaatcagatcaaagatgaaaagattaaaaaggacaaagaacccaaagaagaagttaagagcttcatggatcgaaagaagggatttacagaagttaagtcgcagaatggagaattcatgacccacaaacttaaacatactgagaatactttcagccgccctggagggagggccagcgtggacaccaaggaggctgagggcgccccccaggtggaagccggcaaaaggctggaggagcttcgtcgtcgtcgcggggagaccgagagcgaagagttcgagaagctcaaacagaagcagcaggaggcggctttggagctggaggaactcaagaaaaagagggaggagagaaggaaggtcctggaggaggaagagcagaggaggaagcaggaggaagccgatcgaaaactcagagaggaggaagagaagaggaggctaaaggaagagattgaaaggcgaagagcagaagctgctgagaaacgccagaagatgccagaagatggcttgtcagatgacaagaaaccattcaagtgtttcactcctaaaggttcatctctcaagatagaagagcgagcagaatttttgaataagtctgtgcagaaaagcagtggtgtcaaatcgacccatcaagcagcaatagtctccaagattgacagcagactggagcagtataccagtgcaattgagggaacaaaaagcgcaaaacctacaaagccggcagcctcggatcttcctgttcctgctgaaggtgtacgcaacatcaagagtatgtgggagaaagggaatgtgttttcatcccccactgcagcaggcacaccaaataaggaaactgctggcttgaaggtaggggtttctagccgcatcaatgaatggctaactaaaaccccagatggaaacaagtcacctgctcccaaaccttctgacttgagaccaggagacgtatccagcaagcggaacctctgggaaaagcaatctgtggataaggtcacttcccccactaaggtttgagacagttccagaaagaacccaagctcaagacgcaggacgagctcagttgtagagggctaattcgctctgttttgtatttatgttgatttactaaattgggttcattatcttttatttttcaatatcccagtaaacccatgtatattatcactatatttaataatcacagtctagagatgttcatggtaaaagtactgcctttgcacaggagcctgtttctaaagaaacccatgctgtgaaatagagacttttctactgatcatcataactctgtatctgagcagtgataccaaccacatctgaagtcaacagaagatccaagtttaaaattgcctgcggaatgtgtgcagtatctagaaaaatgaaccgtagtttttgtttttttaaatacagaagtcatgttgtttctgcactttataataaagcatggaagaaattatcttagtaggcaattgtaacactttttgaaagtaacccatttcagatttgaaatactgcaataatggttgtctttaaaaaaaaaaaagaaatgtactgttaaggtattactttttttcatgctgatgattcatatctaaattacattattatgttagctgacagtggtactgattttttaggttggttgttttgtggatttctttagtagtgatagtagcctgaaccacattttagataactcaattatgtatgtatgtgcatacacatatacaaacacactaatggtagaatgcttttttatgtgctagactattatatttagtagtatgtcattgtaactagccaatatcacagcttttgaaaaattaaaaaatcacactatattaatatttcatatttgccaacagaaacatggcagataggtatcaatatgttttcaatgcctgatgacctataagaagaaagtattgaaaagaagagagattagaactgttagaaggagttgaaattttctaaaagacatagtatttagtttataattaaatgcattcttgaagtccagtgtgaattttattaatgctatcatctcgaccaagctcaaagcctacttattagaaacaatgaagttcacaataggtcataaggtctcttccttttctaaaattgaaagacaagaaatttagtgccaatattgtacagacagaaattccatgtatgagtctcaacaaagactacctttggctaaatgtctagaagcagagaagtaaagtgagcaaaatccagtgttgaggagtcatgacagtactttgatctttatatactctgaagcatttcttcaaacttttctacttttatttgtcattgatacctgtagtaagttgacaatgtggtgaaatttcaaaattatatgtaacttctactagttttactttctcccccaagtcttttttaactcatgatttttacacacacaatccagaacttattatatagcctctaagtctttattcttcacagtagataatgaaagagtcctccagtgtcttggcaaaatgttctagtatagctggatacatacagtggagttctataaactcatacctcagtggacttaaccaaaattgtgttagtctcaattcctaccacactgagggagcctcccaaataactattttcttatctgcagtattcctccagaagagctaaccagggcagggctggcatgagaagtgacatctgcgttacaaagtctatcttcctcataagtctgtaaagagcaattgaatcttctagctttagcaaacctaagccaaaggaaggaaagccacgaagaatgcagaagtcaaaccctcatgacaaagtaggcacaagtctacaataagctaaatcagaatttacaaatacaagtgtcccaggtagcattgactcccgtcattggagtgaaatggatcaaagtttgaattaaggcctatggtaaggtaacattgctttgttgtacttttgaacaagagctcctcctgatcactattacatatttttctagaaaatctaaagttcagaagagaatgtatcactgctgacttttattccaatatttggatggagtaagttttagggtagaattttgttcagtttggatttaatcttttgaaaagtaaattccttgtttactggtttgactataattctctgttatctttacgaggtaaaactgcaagctgactagcatgttctgtgaatctgccattcctaaaaattttataaacacttgatacttttcactgataatggatcgctccaataaacatatattgtgaaaatgcatccacaataaatggaattccttcctgcaaaatgtctttttctcacttatttttatgtacaatattgatagtgagaggtatgtctattataataaagattatggcacagtaaaaaaaaaaaaaaaaaa

SEQ ID NO: 98 - DNA, 1309 bp, Homo sapiens
cataatcctgaccctgagccagtgccaggtctccaagtgccttctgaatgaccacaggcgattggttttagtggtaggtgtgtggggatctgttctggtcatctggatgctggtcatcggtgtgcagtattgatcaggacctgcaaacccaaaagcttatgggagctggcacgtcacaaaaagaaaaaaaccaagccacagcctggcagctctgatcaggaaagtgaggaacagcaacaattccggaacattttcaagcagatagcaggagatgacatggagatctgtgcagatgagctcaagaaggtccttaacacagtcgtgaacaaacacaaggacctgaagacacacgggttcacactggagtcctgccgtagcatgattgcgctcatggatacagatggctctggaaagctcaacctgcaggagttccaccacctctggaacaagattaaggcctggcagaaaattttcaaacactatgacacagaccagtccggcaccatcaacagctacgagatgcgaaatgcagtcaacgacgcaggattccacctcaacaaccagctctatgacatcattaccatgcggtacgcagacaaacacatgaacatcgactttgacagtttcatctgctgcttcgttaggctggagggcatgttcagagcttttcatgcatttgacaaggatggagatggtatcatcaagctcaacgttctggagtggctgcagctcaccatgtatgcctgaaccaggctggcctcatccaaagccatgcaggatcactcaggatttcagtttcaccctctatttccaaagccatttacctcaaaggacccagcagctacacccctacaggcttccaggcacctcatcagtcatgctcctcctccattttaccccctacccatccttgatcggtcatgcctagcctgaccctttagtaaagcaatgaggtaggaagaacaaacccttgtccctttgccatgtggaggaaagtgcctgcctctggtccgagccgcctcggttctgaagcgagtgctcctgcttaccttgctctaggctgtctgcagaagcacctgccggtggcactcagcacctccttgtgctagagccctccatcaccttcacgctgtcccaccatgggccaggaaccaaaccagcactgggttctactgctgtggggtaaactaactcagtggaatagggctggttactttgggctgtccaactcataagtttggctgcattttgaaaaaagctgatctaaataaaggcatgtgtatggctggtcaaaaaaaaaaaaaaaaaa

SEQ ID NO: 99 - DNA, 1291 bp, Homo sapiens
cataatcctgaccctgagccagtgccaggtctccaagtgccttctgaatgaccacaggcgattggttttagtggtaggtgtgtggggatctgttctggtcatctggatgctggtcatcggtgtgcagtattgatcaggacctgcaaacccaaaagcttatgggagctggcacgtcacccacagcctggcagctctgatcaggaaagtgaggaacagcaacaattccggaacattttcaagcagatagcaggagatgacatggagatctgtgcagatgagctcaagaaggtccttaacacagtcgtgaacaaacacaaggacctgaagacacacgggttcacactggagtcctgccgtagcatgattgcgctcatggatacagatggctctggaaagctcaacctgcaggagttccaccacctctggaacaagattaaggcctggcagaaaattttcaaacactatgacacagaccagtccggcaccatcaacagctacgagatgcgaaatgcagtcaacgacgcaggattccacctcaacaaccagctctatgacatcattaccatgcggtacgcagacaaacacatgaacatcgactttgacagtttcatctgctgcttcgttaggctggagggcatgttcagagcttttcatgcatttgacaaggatggagatggtatcatcaagctcaacgttctggagtggctgcagctcaccatgtatgcctgaaccaggctggcctcatccaaagccatgcaggatcactcaggatttcagtttcaccctctatttccaaagccatttacctcaaaggacccagcagctacacccctacaggcttccaggcacctcatcagtcatgctcctcctccattttaccccctacccatccttgatcggtcatgcctagcctgaccctttagtaaagcaatgaggtaggaagaacaaacccttgtccctttgccatgtggaggaaagtgcctgcctctggtccgagccgcctcggttctgaagcgagtgctcctgcttaccttgctctaggctgtctgcagaagcacctgccggtggcactcagcacctccttgtgctagagccctccatcaccttcacgctgtcccaccatgggccaggaaccaaaccagcactgggttctactgctgtggggtaaactaactcagtggaatagggctggttactttgggctgtccaactcataagtttggctgcattttgaaaaaagctgatctaaataaaggcatgtgtatggctggtcaaaaaaaaaaaaaaaaaa

SEQ ID NO: 100 - DNA, 3040 bp, Homo sapiens
cactctctttctctctccctctggcatgcatgctgctggtaggagacccccaagtcaacattgcttcagaaatcctttagcactcatttctcaggagaacttatggcttcagaatcacagctcggtttttaagatggacataacctgtacgaccttctgatgggctttcaactttgaactggatgtggacacttttctctcagatgacagaattactccaacttcccctttgcagttgcttcctttccttgaaggtagctgtatcttattttctttaaaaagctttttcttccaaagccacttgccatgccgaccgtcattagcgcatctgtggctccaaggacagcggctgagccccggtccccagggccagttcctcacccggcccagagcaaggccactgaggctgggggtggaaacccaagtggcatctattcagccatcatcagccgcaattttcctattatcggagtgaaagagaagacattcgagcaacttcacaagaaatgtctagaaaagaaagttctttatgtggaccctgagttcccaccggatgagacctctctcttttatagccagaagttccccatccagttcgtctggaagagacctccggaaatttgcgagaatccccgatttatcattgatggagccaacagaactgacatctgtcaaggagagctaggggactgctggtttctcgcagccattgcctgcctgaccctgaaccagcaccttcttttccgagtcataccccatgatcaaagtttcatcgaaaactacgcagggatcttccacttccagttctggcgctatggagagtgggtggacgtggttatagatgactgcctgccaacgtacaacaatcaactggttttcaccaagtccaaccaccgcaatgagttctggagtgctctgctggagaaggcttatgctaagctccatggttcctacgaagctctgaaaggtgggaacaccacagaggccatggaggacttcacaggaggggtggcagagttttttgagatcagggatgctcctagtgacatgtacaagatcatgaagaaagccatcgagagaggctccctcatgggctgctccattgatacaatcattccggttcagtatgagacaagaatggcctgcgggctggtcagaggtcacgcctactctgtcacggggctggatgaggtcccgttcaaaggtgagaaagtgaagctggtgcggctgcggaatccgtggggccaggtggagtggaacggttcttggagtgatagatggaaggactggagctttgtggacaaagatgagaaggcccgtctgcagcaccaggtcactgaggatggagagttctggatgtcctatgaggatttcatctaccatttcacaaagttggagatctgcaacctcacggccgatgctctgcagtctgacaagcttcagacctggacagtgtctgtgaacgagggccgctgggtacggggttgctctgccggaggctgccgcaacttcccagatactttctggaccaaccctcagtaccgtctgaagctcctggaggaggacgatgaccctgatgactcggaggtgatttgcagcttcctggtggccctgatgcagaagaaccggcggaaggaccggaagctaggggccagtctcttcaccattggcttcgccatctacgaggttcccaaagagatgcacgggaacaagcagcacctgcagaaggacttcttcctgtacaacgcctccaaggccaggagcaaaacctacatcaacatgcgggaggtgtcccagcgcttccgcctgcctcccagcgagtacgtcatcgtgccctccacctacgagccccaccaggagggggaattcatcctccgggtcttctctgaaaagaggaacctctctgaggaagttgaaaataccatctccgtggatcggccagtgccacagcctggcagctctgatcaggaaagtgaggaacagcaacaattccggaacattttcaagcagatagcaggagatgacatggagatctgtgcagatgagctcaagaaggtccttaacacagtcgtgaacaaacacaaggacctgaagacacacgggttcacactggagtcctgccgtagcatgattgcgctcatggatacagatggctctggaaagctcaacctgcaggagttccaccacctctggaacaagattaaggcctggcagaaaattttcaaacactatgacacagaccagtccggcaccatcaacagctacgagatgcgaaatgcagtcaacgacgcaggattccacctcaacaaccagctctatgacatcattaccatgcggtacgcagacaaacacatgaacatcgactttgacagtttcatctgctgcttcgttaggctggagggcatgttcagagcttttcatgcatttgacaaggatggagatggtatcatcaagctcaacgttctggagtggctgcagctcaccatgtatgcctgaaccaggctggcctcatccaaagccatgcaggatcactcaggatttcagtttcaccctctatttccaaagccatttacctcaaaggacccagcagctacacccctacaggcttccaggcacctcatcagtcatgctcctcctccattttaccccctacccatccttgatcggtcatgcctagcctgaccctttagtaaagcaatgaggtaggaagaacaaacccttgtccctttgccatgtggaggaaagtgcctgcctctggtccgagccgcctcggttctgaagcgagtgctcctgcttaccttgctctaggctgtctgcagaagcacctgccggtggcactcagcacctccttgtgctagagccctccatcaccttcacgctgtcccaccatgggccaggaaccaaaccagcactgggttctactgctgtggggtaaactaactcagtggaatagggctggttactttgggctgtccaactcataagtttggctgcattttgaaaaaagctgatctaaataaaggcatgtgtatggctggtc

SEQ ID NO: 101 - DNA, 1661 bp, Homo sapiens
ccctcctccacgcttacagccacacacacagtcacacagacgcgttctgagggtggctgcccgcttgggatggaggaatcacttccctcagaacccagccaagtcctctaggcctccttgggggtccttccagcctgaggggcttcggagctgaggagcagctgttctgatgcacgggaacaagcagcacctgcagaaggacttcttcctgtacaacgcctccaaggccaggagcaaaacctacatcaacatgcgggaggtgtcccagcgcttccgcctgcctcccagcgagtacgtcatcgtgccctccacctacgagccccaccaggagggggaattcatcctccgggtcttctctgaaaagaggaacctctctgaggaagttgaaaataccatctccgtggatcggccagtgaaaaagaaaaaaaccaagcccatcatcttcgtttcggacagagcaaacagcaacaaggagctgggtgtggaccaggagtcagaggagggcaaaggcaaaacaagccctgataagcaaaagcagtccccacagccacagcctggcagctctgatcaggaaagtgaggaacagcaacaattccggaacattttcaagcagatagcaggagatgacatggagatctgtgcagatgagctcaagaaggtccttaacacagtcgtgaacaaacacaaggacctgaagacacacgggttcacactggagtcctgccgtagcatgattgcgctcatggatacagatggctctggaaagctcaacctgcaggagttccaccacctctggaacaagattaaggcctggcagaaaattttcaaacactatgacacagaccagtccggcaccatcaacagctacgagatgcgaaatgcagtcaacgacgcaggattccacctcaacaaccagctctatgacatcattaccatgcggtacgcagacaaacacatgaacatcgactttgacagtttcatctgctgcttcgttaggctggagggcatgttcagagcttttcatgcatttgacaaggatggagatggtatcatcaagctcaacgttctggagtggctgcagctcaccatgtatgcctgaaccaggctggcctcatccaaagccatgcaggatcactcaggatttcagtttcaccctctatttccaaagccatttacctcaaaggacccagcagctacacccctacaggcttccaggcacctcatcagtcatgctcctcctccattttaccccctacccatccttgatcggtcatgcctagcctgaccctttagtaaagcaatgaggtaggaagaacaaacccttgtccctttgccatgtggaggaaagtgcctgcctctggtccgagccgcctcggttctgaagcgagtgctcctgcttaccttgctctaggctgtctgcagaagcacctgccggtggcactcagcacctccttgtgctagagccctccatcaccttcacgctgtcccaccatgggccaggaaccaaaccagcactgggttctactgctgtggggtaaactaactcagtggaatagggctggttactttgggctgtccaactcataagtttggctgcattttgaaaaaagctgatctaaataaaggcatgtgtatggctggtcaaaaaaaaaaaaaaaaaa

SEQ ID NO: 102 - DNA, 3881 bp, Homo sapiens
attccagtgtttcagcgaggtggaagtgtgataccaataaagacaactgtaggaaaatccacaggctggatgactgaatcctcctatggactccgggttgctctaagcactaagggttcttcagtgggtgagttatatcttgatgatggccattcattccaatacctccaccagaagcaatttttgcacaggaagttttcattctgttccagtgttctgatcaatagttttgctgaccagaggggtcattatcccagcaagtgtgtggtggagaagatcttggtcttaggcttcaggaaggagccatcttctgtgactacccactcatctgatggtaaagatcagcctgtggcttttacgtattgtgccaaaacatccatcctgagcctggagaagctctcactcaacattgccactgactgggagggttcctaaaaaagctctaaaatgaatgcatagtgtgtctttccttcaagatgtaaatgtcaaggaatgagttggcaaatcagtttaaaaacacaaactacccaacagaaaaatgaaatttgcgagaatccccgatttatcattgatggagccaacagaactgacatctgtcaaggagagctaggggactgctggtttctcgcagccattgcctgcctgaccctgaaccagcaccttcttttccgagtcataccccatgatcaaagtttcatcgaaaactacgcagggatcttccacttccagttctggcgctatggagagtgggtggacgtggttatagatgactgcctgccaacgtacaacaatcaactggttttcaccaagtccaaccaccgcaatgagttctggagtgctctgctggagaaggcttatgctaagctccatggttcctacgaagctctgaaaggtgggaacaccacagaggccatggaggacttcacaggaggggtggcagagttttttgagatcagggatgctcctagtgacatgtacaagatcatgaagaaagccatcgagagaggctccctcatgggctgctccattgatgatggcacgaacatgacctatggaacctctccttctggtctgaacatgggggagttgattgcacggatggtaaggaatatggataactcactgctccaggactcagacctcgaccccagaggctcagatgaaagaccgacccggacaatcattccggttcagtatgagacaagaatggcctgcgggctggtcagaggtcacgcctactctgtcacggggctggatgaggtcccgttcaaaggtgagaaagtgaagctggtgcggctgcggaatccgtggggccaggtggagtggaacggttcttggagtgatagatggaaggactggagctttgtggacaaagatgagaaggcccgtctgcagcaccaggtcactgaggatggagagttctggatgtcctatgaggatttcatctaccatttcacaaagttggagatctgcaacctcacggccgatgctctgcagtctgacaagcttcagacctggacagtgtctgtgaacgagggccgctgggtacggggttgctctgccggaggctgccgcaacttcccagatactttctggaccaaccctcagtaccgtctgaagctcctggaggaggacgatgaccctgatgactcggaggtgatttgcagcttcctggtggccctgatgcagaagaaccggcggaaggaccggaagctaggggccagtctcttcaccattggcttcgccatctacgaggttcccaaagaggtatagcagcagcagcggccagcagttgtgtgcagcactacccagggggccccgagtctgtctgtggctcgtcgagaagcttcctggtggggtttgtgggcaggactgtgataggagagggccttgcctgtgttatttccactgcagagcaggtgcctcagggcattgcatgacccatgactaccacccccaggatgtgcactttctccctcgcaccagacactgcacgtcacacacatgcctttgcacactcaccctcctccacgcttacagccacacacacagtcacacagacgcgttctgagggtggctgcccgcttgggatggaggaatcacttccctcagaacccagccaagtcctctaggcctccttgggggtccttccagcctgaggggcttcggagctgaggagcagctgttctggtaagtgtccctgagtgtggggatgacacatttgccattcactctgaatcacaacagaaaaggaagaggaagtgaggtagggaggctatttaagccttgggagtcggaagtagggaggttgaaactgtgacatgggtgaccagggagttgggaagggacccttggaggtggctgtggcaggacaggatgttcctcccgaggggctcatgtgccctgggctctccccatctctcagatgcacgggaacaagcagcacctgcagaaggacttcttcctgtacaacgcctccaaggccaggagcaaaacctacatcaacatgcgggaggtgtcccagcgcttccgcctgcctcccagcgagtacgtcatcgtgccctccacctacgagccccaccaggagggggaattcatcctccgggtcttctctgaaaagaggaacctctctgaggaagttgaaaataccatctccgtggatcggccagtgcccatcatcttcgtttcggacagagcaaacagcaacaaggagctgggtgtggaccaggagtcagaggagggcaaaggcaaaacaagccctgataagcaaaagcagtccccacagccacagcctggcagctctgatcaggaaagtgaggaacagcaacaattccggaacattttcaagcagatagcaggagatgacatggagatctgtgcagatgagctcaagaaggtccttaacacagtcgtgaacaaacacaaggacctgaagacacacgggttcacactggagtcctgccgtagcatgattgcgctcatggatacagatggctctggaaagctcaacctgcaggagttccaccacctctggaacaagattaaggcctggcagaaaattttcaaacactatgacacagaccagtccggcaccatcaacagctacgagatgcgaaatgcagtcaacgacgcaggattccacctcaacaaccagctctatgacatcattaccatgcggtacgcagacaaacacatgaacatcgactttgacagtttcatctgctgcttcgttaggctggagggcatgttcagagcttttcatgcatttgacaaggatggagatggtatcatcaagctcaacgttctggagtggctgcagctcaccatgtatgcctgaaccaggctggcctcatccaaagccatgcaggatcactcaggatttcagtttcaccctctatttccaaagccatttacctcaaaggacccagcagctacacccctacaggcttccaggcacctcatcagtcatgctcctcctccattttaccccctacccatccttgatcggtcatgcctagcctgaccctttagtaaagcaatgaggtaggaagaacaaacccttgtccctttgccatgtggaggaaagtgcctgcctctggtccgagccgcctcggttctgaagcgagtgctcctgcttaccttgctctaggctgtctgcagaagcacctgccggtggcactcagcacctccttgtgctagagccctccatcaccttcacgctgtcccaccatgggccaggaaccaaaccagcactgggttctactgctgtggggtaaactaactcagtggaatagggctggttactttgggctgtccaactcataagtttggctgcattttgaaaaaagctgatctaaataaaggcatgtgtatggctggtc

SEQ ID NO: 103 - DNA, 3316 bp, Homo sapiens
cactctctttctctctccctctggcatgcatgctgctggtaggagacccccaagtcaacattgcttcagaaatcctttagcactcatttctcaggagaacttatggcttcagaatcacagctcggtttttaagatggacataacctgtacgaccttctgatgggctttcaactttgaactggatgtggacacttttctctcagatgacagaattactccaacttcccctttgcagttgcttcctttccttgaaggtagctgtatcttattttctttaaaaagctttttcttccaaagccacttgccatgccgaccgtcattagcgcatctgtggctccaaggacagcggctgagccccggtccccagggccagttcctcacccggcccagagcaaggccactgaggctgggggtggaaacccaagtggcatctattcagccatcatcagccgcaattttcctattatcggagtgaaagagaagacattcgagcaacttcacaagaaatgtctagaaaagaaagttctttatgtggaccctgagttcccaccggatgagacctctctcttttatagccagaagttccccatccagttcgtctggaagagacctccggaaatttgcgagaatccccgatttatcattgatggagccaacagaactgacatctgtcaaggagagctaggggactgctggtttctcgcagccattgcctgcctgaccctgaaccagcaccttcttttccgagtcataccccatgatcaaagtttcatcgaaaactacgcagggatcttccacttccagttctggcgctatggagagtgggtggacgtggttatagatgactgcctgccaacgtacaacaatcaactggttttcaccaagtccaaccaccgcaatgagttctggagtgctctgctggagaaggcttatgctaagctccatggttcctacgaagctctgaaaggtgggaacaccacagaggccatggaggacttcacaggaggggtggcagagttttttgagatcagggatgctcctagtgacatgtacaagatcatgaagaaagccatcgagagaggctccctcatgggctgctccattgatgatggcacgaacatgacctatggaacctctccttctggtctgaacatgggggagttgattgcacggatggtaaggaatatggataactcactgctccaggactcagacctcgaccccagaggctcagatgaaagaccgacccggacaatcattccggttcagtatgagacaagaatggcctgcgggctggtcagaggtcacgcctactctgtcacggggctggatgaggtcccgttcaaaggtgagaaagtgaagctggtgcggctgcggaatccgtggggccaggtggagtggaacggttcttggagtgatagatggaaggactggagctttgtggacaaagatgagaaggcccgtctgcagcaccaggtcactgaggatggagagttctggatgtcctatgaggatttcatctaccatttcacaaagttggagatctgcaacctcacggccgatgctctgcagtctgacaagcttcagacctggacagtgtctgtgaacgagggccgctgggtacggggttgctctgccggaggctgccgcaacttcccagatactttctggaccaaccctcagtaccgtctgaagctcctggaggaggacgatgaccctgatgactcggaggtgatttgcagcttcctggtggccctgatgcagaagaaccggcggaaggaccggaagctaggggccagtctcttcaccattggcttcgccatctacgaggttcccaaagagatgcacgggaacaagcagcacctgcagaaggacttcttcctgtacaacgcctccaaggccaggagcaaaacctacatcaacatgcgggaggtgtcccagcgcttccgcctgcctcccagcgagtacgtcatcgtgccctccacctacgagccccaccaggagggggaattcatcctccgggtcttctctgaaaagaggaacctctctgaggaagttgaaaataccatctccgtggatcggccagtgaaaaagaaaaaaaccaagcccatcatcttcgtttcggacagagcaaacagcaacaaggagctgggtgtggaccaggagtcagaggagggcaaaggcaaaacaagccctgataagcaaaagcagtccccacagccacagcctggcagctctgatcaggaaagtgaggaacagcaacaattccggaacattttcaagcagatagcaggagatgacatggagatctgtgcagatgagctcaagaaggtccttaacacagtcgtgaacaaacacaaggacctgaagacacacgggttcacactggagtcctgccgtagcatgattgcgctcatggatacagatggctctggaaagctcaacctgcaggagttccaccacctctggaacaagattaaggcctggcagaaaattttcaaacactatgacacagaccagtccggcaccatcaacagctacgagatgcgaaatgcagtcaacgacgcaggattccacctcaacaaccagctctatgacatcattaccatgcggtacgcagacaaacacatgaacatcgactttgacagtttcatctgctgcttcgttaggctggagggcatgttcagagcttttcatgcatttgacaaggatggagatggtatcatcaagctcaacgttctggagtggctgcagctcaccatgtatgcctgaaccaggctggcctcatccaaagccatgcaggatcactcaggatttcagtttcaccctctatttccaaagccatttacctcaaaggacccagcagctacacccctacaggcttccaggcacctcatcagtcatgctcctcctccattttaccccctacccatccttgatcggtcatgcctagcctgaccctttagtaaagcaatgaggtaggaagaacaaacccttgtccctttgccatgtggaggaaagtgcctgcctctggtccgagccgcctcggttctgaagcgagtgctcctgcttaccttgctctaggctgtctgcagaagcacctgccggtggcactcagcacctccttgtgctagagccctccatcaccttcacgctgtcccaccatgggccaggaaccaaaccagcactgggttctactgctgtggggtaaactaactcagtggaatagggctggttactttgggctgtccaactcataagtttggctgcattttgaaaaaagctgatctaaataaaggcatgtgtatggctggtc

SEQ ID NO: 104 - DNA, 3223 bp, Homo sapiens
attccagtgtttcagcgaggtggaagtgtgataccaataaagacaactgtaggaaaatccacaggctggatgactgaatcctcctatggactccgggttgctctaagcactaagggttcttcagtgggtgagttatatcttgatgatggccattcattccaatacctccaccagaagcaatttttgcacaggaagttttcattctgttccagtgttctgatcaatagttttgctgaccagaggggtcattatcccagcaagtgtgtggtggagaagatcttggtcttaggcttcaggaaggagccatcttctgtgactacccactcatctgatggtaaagatcagcctgtggcttttacgtattgtgccaaaacatccatcctgagcctggagaagctctcactcaacattgccactgactgggagggttcctaaaaaagctctaaaatgaatgcatagtgtgtctttccttcaagatgtaaatgtcaaggaatgagttggcaaatcagtttaaaaacacaaactacccaacagaaaaatgaaatttgcgagaatccccgatttatcattgatggagccaacagaactgacatctgtcaaggagagctaggggactgctggtttctcgcagccattgcctgcctgaccctgaaccagcaccttcttttccgagtcataccccatgatcaaagtttcatcgaaaactacgcagggatcttccacttccagttctggcgctatggagagtgggtggacgtggttatagatgactgcctgccaacgtacaacaatcaactggttttcaccaagtccaaccaccgcaatgagttctggagtgctctgctggagaaggcttatgctaagctccatggttcctacgaagctctgaaaggtgggaacaccacagaggccatggaggacttcacaggaggggtggcagagttttttgagatcagggatgctcctagtgacatgtacaagatcatgaagaaagccatcgagagaggctccctcatgggctgctccattgatgatggcacgaacatgacctatggaacctctccttctggtctgaacatgggggagttgattgcacggatggtaaggaatatggataactcactgctccaggactcagacctcgaccccagaggctcagatgaaagaccgacccggacaatcattccggttcagtatgagacaagaatggcctgcgggctggtcagaggtcacgcctactctgtcacggggctggatgaggtcccgttcaaaggtgagaaagtgaagctggtgcggctgcggaatccgtggggccaggtggagtggaacggttcttggagtgatagatggaaggactggagctttgtggacaaagatgagaaggcccgtctgcagcaccaggtcactgaggatggagagttctggatgtcctatgaggatttcatctaccatttcacaaagttggagatctgcaacctcacggccgatgctctgcagtctgacaagcttcagacctggacagtgtctgtgaacgagggccgctgggtacggggttgctctgccggaggctgccgcaacttcccagatactttctggaccaaccctcagtaccgtctgaagctcctggaggaggacgatgaccctgatgactcggaggtgatttgcagcttcctggtggccctgatgcagaagaaccggcggaaggaccggaagctaggggccagtctcttcaccattggcttcgccatctacgaggttcccaaagagatgcacgggaacaagcagcacctgcagaaggacttcttcctgtacaacgcctccaaggccaggagcaaaacctacatcaacatgcgggaggtgtcccagcgcttccgcctgcctcccagcgagtacgtcatcgtgccctccacctacgagccccaccaggagggggaattcatcctccgggtcttctctgaaaagaggaacctctctgaggaagttgaaaataccatctccgtggatcggccagtgcccatcatcttcgtttcggacagagcaaacagcaacaaggagctgggtgtggaccaggagtcagaggagggcaaaggcaaaacaagccctgataagcaaaagcagtccccacagccacagcctggcagctctgatcaggaaagtgaggaacagcaacaattccggaacattttcaagcagatagcaggagatgacatggagatctgtgcagatgagctcaagaaggtccttaacacagtcgtgaacaaacacaaggacctgaagacacacgggttcacactggagtcctgccgtagcatgattgcgctcatggatacagatggctctggaaagctcaacctgcaggagttccaccacctctggaacaagattaaggcctggcagaaaattttcaaacactatgacacagaccagtccggcaccatcaacagctacgagatgcgaaatgcagtcaacgacgcaggattccacctcaacaaccagctctatgacatcattaccatgcggtacgcagacaaacacatgaacatcgactttgacagtttcatctgctgcttcgttaggctggagggcatgttcagagcttttcatgcatttgacaaggatggagatggtatcatcaagctcaacgttctggagtggctgcagctcaccatgtatgcctgaaccaggctggcctcatccaaagccatgcaggatcactcaggatttcagtttcaccctctatttccaaagccatttacctcaaaggacccagcagctacacccctacaggcttccaggcacctcatcagtcatgctcctcctccattttaccccctacccatccttgatcggtcatgcctagcctgaccctttagtaaagcaatgaggtaggaagaacaaacccttgtccctttgccatgtggaggaaagtgcctgcctctggtccgagccgcctcggttctgaagcgagtgctcctgcttaccttgctctaggctgtctgcagaagcacctgccggtggcactcagcacctccttgtgctagagccctccatcaccttcacgctgtcccaccatgggccaggaaccaaaccagcactgggttctactgctgtggggtaaactaactcagtggaatagggctggttactttgggctgtccaactcataagtttggctgcattttgaaaaaagctgatctaaataaaggcatgtgtatggctggtc

SEQ ID NO: 105 - DNA, 3501 bp, Homo sapiens
attccagtgtttcagcgaggtggaagtgtgataccaataaagacaactgtaggaaaatccacaggctggatgactgaatcctcctatggactccgggttgctctaagcactaagggttcttcagtgggtgagttatatcttgatgatggccattcattccaatacctccaccagaagcaatttttgcacaggaagttttcattctgttccagtgttctgatcaatagttttgctgaccagaggggtcattatcccagcaagtgtgtggtggagaagatcttggtcttaggcttcaggaaggagccatcttctgtgactacccactcatctgatggtaaagatcagcctgtggcttttacgtattgtgccaaaacatccatcctgagcctggagaagctctcactcaacattgccactgactgggagggttcctaaaaaagctctaaaatgaatgcatagtgtgtctttccttcaagatgtaaatgtcaaggaatgagttggcaaatcagtttaaaaacacaaactacccaacagaaaaatgaaatttgcgagaatccccgatttatcattgatggagccaacagaactgacatctgtcaaggagagctagacgggttccagggcagctgcctacctggccttccttccaatacaaatcatcttggtggatggttctctgaggctcagtcttcgctgaagtcagaagaggaattggactcacattgcaaaggcacagggcagggcagatttcctacaggtgttaggaagaacaacccagttatgatcacctactgctctgtctccattgaggcctaaaaaggaagtgagtttatactgcagttggaggaactgcctgcagccttgaggaaaatgtctagtcacaagggagggactgctggtttctcgcagccattgcctgcctgaccctgaaccagcaccttcttttccgagtcataccccatgatcaaagtttcatcgaaaactacgcagggatcttccacttccagttctggcgctatggagagtgggtggacgtggttatagatgactgcctgccaacgtacaacaatcaactggttttcaccaagtccaaccaccgcaatgagttctggagtgctctgctggagaaggcttatgctaagctccatggttcctacgaagctctgaaaggtgggaacaccacagaggccatggaggacttcacaggaggggtggcagagttttttgagatcagggatgctcctagtgacatgtacaagatcatgaagaaagccatcgagagaggctccctcatgggctgctccattgatgatggcacgaacatgacctatggaacctctccttctggtctgaacatgggggagttgattgcacggatggtaaggaatatggataactcactgctccaggactcagacctcgaccccagaggctcagatgaaagaccgacccggacaatcattccggttcagtatgagacaagaatggcctgcgggctggtcagaggtcacgcctactctgtcacggggctggatgaggtcccgttcaaaggtgagaaagtgaagctggtgcggctgcggaatccgtggggccaggtggagtggaacggttcttggagtgatagatggaaggactggagctttgtggacaaagatgagaaggcccgtctgcagcaccaggtcactgaggatggagagttctggatgtcctatgaggatttcatctaccatttcacaaagttggagatctgcaacctcacggccgatgctctgcagtctgacaagcttcagacctggacagtgtctgtgaacgagggccgctgggtacggggttgctctgccggaggctgccgcaacttcccagatactttctggaccaaccctcagtaccgtctgaagctcctggaggaggacgatgaccctgatgactcggaggtgatttgcagcttcctggtggccctgatgcagaagaaccggcggaaggaccggaagctaggggccagtctcttcaccattggcttcgccatctacgaggttcccaaagagatgcacgggaacaagcagcacctgcagaaggacttcttcctgtacaacgcctccaaggccaggagcaaaacctacatcaacatgcgggaggtgtcccagcgcttccgcctgcctcccagcgagtacgtcatcgtgccctccacctacgagccccaccaggagggggaattcatcctccgggtcttctctgaaaagaggaacctctctgaggaagttgaaaataccatctccgtggatcggccagtgcccatcatcttcgtttcggacagagcaaacagcaacaaggagctgggtgtggaccaggagtcagaggagggcaaaggcaaaacaagccctgataagcaaaagcagtccccacagccacagcctggcagctctgatcaggaaagtgaggaacagcaacaattccggaacattttcaagcagatagcaggagatgacatggagatctgtgcagatgagctcaagaaggtccttaacacagtcgtgaacaaacacaaggacctgaagacacacgggttcacactggagtcctgccgtagcatgattgcgctcatggatacagatggctctggaaagctcaacctgcaggagttccaccacctctggaacaagattaaggcctggcagaaaattttcaaacactatgacacagaccagtccggcaccatcaacagctacgagatgcgaaatgcagtcaacgacgcaggattccacctcaacaaccagctctatgacatcattaccatgcggtacgcagacaaacacatgaacatcgactttgacagtttcatctgctgcttcgttaggctggagggcatgttcagagcttttcatgcatttgacaaggatggagatggtatcatcaagctcaacgttctggagtggctgcagctcaccatgtatgcctgaaccaggctggcctcatccaaagccatgcaggatcactcaggatttcagtttcaccctctatttccaaagccatttacctcaaaggacccagcagctacacccctacaggcttccaggcacctcatcagtcatgctcctcctccattttaccccctacccatccttgatcggtcatgcctagcctgaccctttagtaaagcaatgaggtaggaagaacaaacccttgtccctttgccatgtggaggaaagtgcctgcctctggtccgagccgcctcggttctgaagcgagtgctcctgcttaccttgctctaggctgtctgcagaagcacctgccggtggcactcagcacctccttgtgctagagccctccatcaccttcacgctgtcccaccatgggccaggaaccaaaccagcactgggttctactgctgtggggtaaactaactcagtggaatagggctggttactttgggctgtccaactcataagtttggctgcattttgaaaaaagctgatctaaataaaggcatgtgtatggctggtc

SEQ ID NO: 106 - DNA, 3298 bp, Homo sapiens
cactctctttctctctccctctggcatgcatgctgctggtaggagacccccaagtcaacattgcttcagaaatcctttagcactcatttctcaggagaacttatggcttcagaatcacagctcggtttttaagatggacataacctgtacgaccttctgatgggctttcaactttgaactggatgtggacacttttctctcagatgacagaattactccaacttcccctttgcagttgcttcctttccttgaaggtagctgtatcttattttctttaaaaagctttttcttccaaagccacttgccatgccgaccgtcattagcgcatctgtggctccaaggacagcggctgagccccggtccccagggccagttcctcacccggcccagagcaaggccactgaggctgggggtggaaacccaagtggcatctattcagccatcatcagccgcaattttcctattatcggagtgaaagagaagacattcgagcaacttcacaagaaatgtctagaaaagaaagttctttatgtggaccctgagttcccaccggatgagacctctctcttttatagccagaagttccccatccagttcgtctggaagagacctccggaaatttgcgagaatccccgatttatcattgatggagccaacagaactgacatctgtcaaggagagctaggggactgctggtttctcgcagccattgcctgcctgaccctgaaccagcaccttcttttccgagtcataccccatgatcaaagtttcatcgaaaactacgcagggatcttccacttccagttctggcgctatggagagtgggtggacgtggttatagatgactgcctgccaacgtacaacaatcaactggttttcaccaagtccaaccaccgcaatgagttctggagtgctctgctggagaaggcttatgctaagctccatggttcctacgaagctctgaaaggtgggaacaccacagaggccatggaggacttcacaggaggggtggcagagttttttgagatcagggatgctcctagtgacatgtacaagatcatgaagaaagccatcgagagaggctccctcatgggctgctccattgatgatggcacgaacatgacctatggaacctctccttctggtctgaacatgggggagttgattgcacggatggtaaggaatatggataactcactgctccaggactcagacctcgaccccagaggctcagatgaaagaccgacccggacaatcattccggttcagtatgagacaagaatggcctgcgggctggtcagaggtcacgcctactctgtcacggggctggatgaggtcccgttcaaaggtgagaaagtgaagctggtgcggctgcggaatccgtggggccaggtggagtggaacggttcttggagtgatagatggaaggactggagctttgtggacaaagatgagaaggcccgtctgcagcaccaggtcactgaggatggagagttctggatgtcctatgaggatttcatctaccatttcacaaagttggagatctgcaacctcacggccgatgctctgcagtctgacaagcttcagacctggacagtgtctgtgaacgagggccgctgggtacggggttgctctgccggaggctgccgcaacttcccagatactttctggaccaaccctcagtaccgtctgaagctcctggaggaggacgatgaccctgatgactcggaggtgatttgcagcttcctggtggccctgatgcagaagaaccggcggaaggaccggaagctaggggccagtctcttcaccattggcttcgccatctacgaggttcccaaagagatgcacgggaacaagcagcacctgcagaaggacttcttcctgtacaacgcctccaaggccaggagcaaaacctacatcaacatgcgggaggtgtcccagcgcttccgcctgcctcccagcgagtacgtcatcgtgccctccacctacgagccccaccaggagggggaattcatcctccgggtcttctctgaaaagaggaacctctctgaggaagttgaaaataccatctccgtggatcggccagtgcccatcatcttcgtttcggacagagcaaacagcaacaaggagctgggtgtggaccaggagtcagaggagggcaaaggcaaaacaagccctgataagcaaaagcagtccccacagccacagcctggcagctctgatcaggaaagtgaggaacagcaacaattccggaacattttcaagcagatagcaggagatgacatggagatctgtgcagatgagctcaagaaggtccttaacacagtcgtgaacaaacacaaggacctgaagacacacgggttcacactggagtcctgccgtagcatgattgcgctcatggatacagatggctctggaaagctcaacctgcaggagttccaccacctctggaacaagattaaggcctggcagaaaattttcaaacactatgacacagaccagtccggcaccatcaacagctacgagatgcgaaatgcagtcaacgacgcaggattccacctcaacaaccagctctatgacatcattaccatgcggtacgcagacaaacacatgaacatcgactttgacagtttcatctgctgcttcgttaggctggagggcatgttcagagcttttcatgcatttgacaaggatggagatggtatcatcaagctcaacgttctggagtggctgcagctcaccatgtatgcctgaaccaggctggcctcatccaaagccatgcaggatcactcaggatttcagtttcaccctctatttccaaagccatttacctcaaaggacccagcagctacacccctacaggcttccaggcacctcatcagtcatgctcctcctccattttaccccctacccatccttgatcggtcatgcctagcctgaccctttagtaaagcaatgaggtaggaagaacaaacccttgtccctttgccatgtggaggaaagtgcctgcctctggtccgagccgcctcggttctgaagcgagtgctcctgcttaccttgctctaggctgtctgcagaagcacctgccggtggcactcagcacctccttgtgctagagccctccatcaccttcacgctgtcccaccatgggccaggaaccaaaccagcactgggttctactgctgtggggtaaactaactcagtggaatagggctggttactttgggctgtccaactcataagtttggctgcattttgaaaaaagctgatctaaataaaggcatgtgtatggctggtc

SEQ ID NO: 107 - DNA, 4485 bp, Homo sapiens
gtagacagatccaggctcaccagtcctgtgccactgggcttttggcgttctgcacaaggcctacccgcagatgccatgcctgctcccccagcctaatgggctttgatgggggaagagggtggttcagcctctcacgatgaggaggaaagagcaagtgtcctcctcggacattctccgggttgtgaaatgtgctcgcaggaggcttttcaggcacagaggagccagctggtcgagctgctggtctcagggtccctggaaggcttcgagagtgtcctggactggctgctgtcctgggaggtcctctcctgggaggactacgagggcttccacctcctgggccagcctctctcccacttggccaggcgccttctggacaccgtctggaataagggtacttgggcctgtcagaagctcatcgcggctgcccaagaagcccaggccgacagccagtcccccaagctgcatggctgctgggacccccactcgctccacccagcccgagacctgcagagtcaccggccagccattgtcaggaggctccacagccatgtggagaacatgctggacctggcatgggagcggggtttcgtcagccagtatgaatgtgatgaaatcaggttgccgatcttcacaccgtcccagagggcaagaaggctgcttgatcttgccacggtgaaagcgaatggattggctgccttccttctacaacatgttcaggaattaccagtcccattggccctgcctttggaagctgccacatgcaagaagtatatggccaagctgaggaccacggtgtctgctcagtctcgcttcctcagtacctatgatggagcagagacgctctgcctggaggacatatacacagagaatgtcctggaggtctgggcagatgtgggcatggctggacccccgcagaagagcccagccaccctgggcctggaggagctcttcagcacccctggccacctcaatgacgatgcggacactgtgctggtggtgggtgaggcgggcagtggcaagagcacgctcctgcagcggctgcacttgctgtgggctgcagggcaagacttccaggaatttctctttgtcttcccattcagctgccggcagctgcagtgcatggccaaaccactctctgtgcggactctactctttgagcactgctgttggcctgatgttggtcaagaagacatcttccagttactccttgaccaccctgaccgtgtcctgttaacctttgatggctttgacgagttcaagttcaggttcacggatcgtgaacgccactgctccccgaccgaccccacctctgtccagaccctgctcttcaaccttctgcagggcaacctgctgaagaatgcccgcaaggtggtgaccagccgtccggccgctgtgtcggcgttcctcaggaagtacatccgcaccgagttcaacctcaagggcttctctgaacagggcatcgagctgtacctgaggaagcgccatcatgagcccggggtggcggaccgcctcatccgcctgctccaagagacctcagccctgcacggtttgtgccacctgcctgtcttctcatggatggtgtccaaatgccaccaggaactgttgctgcaggagggggggtccccaaagaccactacagatatgtacctgctgattctgcagcattttctgctgcatgccacccccccagactcagcttcccaaggtctgggacccagtcttcttcggggccgcctccccaccctcctgcacctgggcagactggctctgtggggcctgggcatgtgctgctacgtgttctcagcccagcagctccaggcagcacaggtcagccctgatgacatttctcttggcttcctggtgcgtgccaaaggtgtcgtgccagggagtacggcgcccctggaattccttcacatcactttccagtgcttctttgccgcgttctacctggcactcagtgctgatgtgccaccagctttgctcagacacctcttcaattgtggcaggccaggcaactcaccaatggccaggctcctgcccacgatgtgcatccaggcctcggagggaaaggacagcagcgtggcagctttgctgcagaaggccgagccgcacaaccttcagatcacagcagccttcctggcagggctgttgtcccgggagcactggggcctgctggctgagtgccagacatctgagaaggccctgctccggcgccaggcctgtgcccgctggtgtctggcccgcagcctccgcaagcacttccactccatcccgccagctgcaccgggtgaggccaagagcgtgcatgccatgcccgggttcatctggctcatccggagcctgtacgagatgcaggaggagcggctggctcggaaggctgcacgtggcctgaatgttgggcacctcaagttgacattttgcagtgtgggccccactgagtgtgctgccctggcctttgtgctgcagcacctccggcggcccgtggccctgcagctggactacaactctgtgggtgacattggcgtggagcagctgctgccttgccttggtgtctgcaaggctctgtatttgcgcgataacaatatctcagaccgaggcatctgcaagctcattgaatgtgctcttcactgcgagcaattgcagaagttagctctattcaacaacaaattgactgacggctgtgcacactccatggctaagctccttgcatgcaggcagaacttcttggcattgaggctggggaataactacatcactgccgcgggagcccaagtgctggccgaggggctccgaggcaacacctccttgcagttcctgggattctggggcaacagagtgggtgacgagggggcccaggccctggctgaagccttgggtgatcaccagagcttgaggtggctcagcctggtggggaacaacattggcagtgtgggtgcccaagccttggcactgatgctggcaaagaacgtcatgctagaagaactctgcctggaggagaaccatctccaggatgaaggtgtatgttctctcgcagaaggactgaagaaaaattcaagtttgaaaatcctgaagttgtccaataactgcatcacctacctaggggcagaagccctcctgcaggcccttgaaaggaatgacaccatcctggaagtctggctccgagggaacactttctctctagaggaggttgacaagctcggctgcagggacaccagactcttgctttgaagtctccgggaggatgttcgtctcagtttgtttgtgagcaggctgtgagtttgggccccagaggctgggtgacatgtgttggcagcctcttcaaaatgagccctgtcctgcctaaggctgaacttgttttctgggaacaccataggtcacctttattctggcagaggagggagcatcagtgccctccaggatagacttttcccaagcctacttttgccattgacttcttcccaagattcaatcccaggatgtacaaggacagcccctcctccatagtatgggactggcctctgctgatcctcccaggcttccgtgtgggtcagtggggcccatggatgtgcttgttaactgagtgccttttggtggagaggcccggcctctcacaaaagaccccttaccactgctctgatgaagaggagtacacagaacacataattcaggaagcagctttccccatgtctcgactcatccatccaggccattccccgtctctggttcctcccctcctcctggactcctgcacacgctccttcctctgaggctgaaattcagaatattagtgacctcagctttgatatttcacttacagcacccccaaccctggcacccagggtgggaagggctacaccttagcctgccctcctttccggtgtttaagacatttttggaaggggacacgtgacagccgtttgttccccaagacattctaggtttgcaagaaaaatatgaccacactccagctgggatcacatgtggacttttatttccagtgaaatcagttactcttcagttaagcctttggaaacagctcgactttaaaaagctccaaatgcagctttaaaaaattaatctgggccagaatttcaaacggcctcactaggcttctggttgatgcctgtgaactgaactctgacaacagacttctgaaatagacccacaagaggcagttccatttcatttgtgccagaatgctttaggatgtacagttatggattgaaagtttacaggaaaaaaaattaggccgttccttcaaagcaaatgtcttcctggattattcaaaatgatgtatgttgaagcctttgtaaattgtcagatgctgtgcaaatgttattattttaaacattatgatgtgtgaaaactggttaatatttataggtcactttgttttactgtcttaagtttatactcttatagacaacatggccgtgaactttatgctgtaaataatcagaggggaataaactgttgagtcaaaac

SEQ ID NO: 108 - DNA, 4097 bp, Homo sapiens
attctttttttaacttttacttattcattaggatgatttcataatatatttcctggtttagaggaaacaggaacaatggctaccgagagtactccctcagagatcatagaaagagaaagaaaaaagttgcttgaaatccttcaacatgatcctgattctatcttagacacgttaacttctcggaggctgatttctgaggaagagtatgagactctggagaatgttacagatctcctgaagaaaagtcggaagctgttaattttggtacagaaaaagggagaggcgacctgtcagcattttctcaagtgtttatttagtacttttccacagtcagctgccatttgcggcttaaggcatgaagttttaaaacatgagaatacagtacctcctcaatctatgggggcaagcagtaattcagaagatgctttttctcctggaataaaacagcctgaagcccctgagatcacagtgttcttcagtgagaaggaacacttggatttggaaacctctgagtttttcagggacaagaaaactagttatagggaaacagctttgtctgccaggaagaatgagaaggaatatgacacaccagaagtcacattatcatattcagttgagaaagttggatgtgaagttccagcaactattacatatataaaagatggacagagatatgaggagctagatgattctttatacttaggaaaagaggaatatctaggatctgttgacacccctgaagatgcagaagccactgtggaagaggaggtttatgatgacccagagcacgttggatatgatggtgaagaggacttcgagaattcagaaaccacagagttctctggtgaagaaccaagttatgagggatcagaaaccagcctttcattggaggaggaacaggagaaaagtatagaagaaagaaaaaaggtgtttaaagatgtcctgttatgtttgaacatggatagaagcagaaaggttctgccagattttgttaaacaattctccttagatcgaggatgtaagtggacccctgagagtccaggagacttagcctggaatttcctgatgaaagttcaagcacgagatgtgacggctagggattcaatcctcagtcacaaggttctggatgaagatagcaaggaggatttgctggctggagtggagaatttggaaattcgagacatacaaaccattaatccccttgacgtgctttgtgccaccatgctgtgttcagatagctctttgcaacgccaagtcatgtcaaacatgtatcagtgccagtttgctcttcccctgctactgccagatgcagaaaacaacaaaagcatcttaatgctgggggccatgaaagacattgtgaagaagcagtcaacacagttttcaggggggcctacagaggatacagaaaagtttctgactctcatgaagatgcctgtcatctcttttgtgcgtctaggatactgtagcttctctaagtccagaatcctcaacacacttctcagccctgcccagttgaaattacacaaaatctttcttcatcaagatttgcctcttttggtgcttccccggcaaatctctgatggcctggttgagataacatggtgttttcctgatagcgatgatagaaaggaaaacccctttttccaaaagcctgttgctctggctaatctccgtggaaatctagaaagcttttggactcagtttggttttttgatggaagtttcttcagctgtgttttttttcactgactgtttaggtgagaaggaatgggacttgctaatgtttttaggagaggctgccattgaaagatgctactttgttctcagttcccaagccagggagagtgaagaggctcaaatttttcagaggatactgaacttgaagccagcacagctactgttttgggagaggggagatgctggggatagaaggaagaacatggagggccttcaagctgccctccaggaagtgatgttctcttcttgcctcagatgtgtgtctgtggaggatatggccgccctggccagggagctggggattcaggtagatgaagactttgaaaacactcagagaattcaagtttcctctggagaaaacatggctgggacagctgaaggtgagggtcagcaaagacacagtcagctaaaaagctcatctaaaagccaggctctaatgccaattcaagagcctgggactcaatgtgagctcagccagaatcttcagaatctctatggtaccccagtattcaggcctgttctagagaactcctggctctttccaaccagaattggaggtaactttaaccatgtttccttgaaagcctcctgggttatgggccgcccctttgggtcagagcagaggcctaagtggttccatcctttgccttttcagaatgcaggggcccagggccgaggtaaaagttttggtattcaatccttccatccccagatattttattcaggtgaaagattcatgaaattttccagagttgctcggggatgtcactcgaatggaacatttgggagactgccaagacccatttgtcagcatgtacaggcctgccctgagagaccacaaatgatgggaactcttgaaaggtctagggcagtagcctccaagataggtcactcctattccctggattcacagccagcaagagcagtagggaagccatggcctcagcaagcttgcaccagggtaacagagttaactgaagcaactggaaaactgataagaacatcccatattggaaagcctcaccctcagtcctttcaaccagcagcagccacacaaaaactaagacctgcttctcagcaaggagtccagatgaagacacaaggtggggcttcaaatccagctctccaaatagggtcccatcccatgtgcaagagctctcagttcaaatccgatcagtccaacccatccacagtcaaacactcccagcctaaacccttccattctgtgccctctcaacctaaatcctctcagacaaaatcctgtcagtcccagccctcccaaactaaaccttctccatgcaaatctactcagcctaagccaagccagccctggcctccccagtctaagccttctcagcccagaccccctcaacctaagtcatcctcaaccaatccttcacaagctaaggcacaccactcaaaagcagggcagaagaggggagggaagcattaaagagctaactccagagatctataaagcatatcctttacccaggccattcctatcatatagtaagcagaagagttgccatgaaagtaaaagactactgtcattagcatgtaaaacaaagaaagatatacatgactgaattggatatctttgtttgtttgtttgagacagagtttcactcttgttgcccaggctggagtgcaatggcacgatctcggctcaccgcaacctctgcttcctggcttaaagtgattctcctgcctcagcctctcgagtagctgggattacaggcatgcaccaccacacccagctaattttgtatttttagtagaggcagggtttctccatgttggtcaggctggtcttgaactcccgacctcaggtgatccgcccacctaggcctctcaaagtgttgggattacgtgtgtaagccacagtgcccagcccgaattggatatctttaagatatctgtaagtgttatatccctaaccaagaagaaaaatatgaaaataattaagactagaatcaagcagtagataattgaatccaatcttgggtattattagataatgtataacttgcacccagggaatgggggtctatgagacaaccccacttggagaagaatggggttagggtctctaattgcaaagtgactgtacaataggacgaaagttgcctctgtgtctgagaaagtatcttagttgttggctgctccagaggtatctttgtcaaaagcttctggttcaatatcagccactgagcagataaccctgcttatttggtgtggttaaatcaactagcttctgctaatagccccaatttgcttgaatgggaaaactctctcatttgacccttataggtagaaataatgaattaacaaccaataaaattaatcatttggcattaa

SEQ ID NO: 109 - DNA, 4034 bp, Homo sapiens
gcggccgccccgcgcgccccagccccgccgcgcgcctgagcccggtgcggcgccagaagacagcgcgcagccgcccctgagtcgtggaggcggggaccaagctggaaggagcagcgactcccggaccgagtcgcgagtgtgcgccgtccgccgcccgccggatcccccggaccccccgaccccccagtggacaggaaagctaaggcctcagcgatgccggactccccagcggaggtgaagacgcagccccggtccacaccccccagcatgccgcccccaccgcctgccgcatcccagggggccacacgccccccctccttcacgccacacacactgatgaacggcagcagccactcaccaacagccatcaatggtgcaccgtgcacacccaacggcttcagcaatggcccggccacctcgtccacagcctccttgtccacacagcacctgcccccagcctgcggggcccggcagctcagcaagctcaagcgcttcctcaccacactgcagcagtttggcagcgacatctccccagagattggggagcgcgtgcgcacactggtgctgggcctggtgaactcgacattgacgatcgaggagtttcattccaagcttcaggaggccaccaacttccctctgcggccgtttgtcattcccttcctgaaggcaaacctgcccttgctgcagcgggagctcctgcactgtgcacgcctggccaagcagacgcccgcccagtacttggcccagcatgagcagctcctgctggacgccagcgcctcctcccccatcgactcctcagagctgctactggaagtcaacgagaacggcaagaggaggacgcccgacaggaccaaagagaacgggtcagaccgcgacccgctgcaccccgagcacctcagcaaacggccatgcaccctgaaccctgcccagcgctacagccccagcaacgggccaccgcagcccacaccgccgccgcactaccgcctggaggacatagccatggcccaccacttccgagatgcctaccgccacccagacccccgggagctacgagagcgccatcggccgcttgtggtgcctgggtcccggcaggaagaagtgatcgaccacaagctcacagagcgtgagtgggcagaagagtggaagcacctcaacaacctcctgaactgcatcatggacatggtggagaagacgcggcgctcgctcacggtgctgcgcaggtgccaggaggccgaccgcgaggagctcaaccactgggcgcggcgctacagcgacgccgaggacacaaagaagggccccgctcccgccgcggcccggccccgcagcagctccgccggtcccgaagggcctcagctagacgtgcctcgcgagttcctgccgaggaccctcaccggctacgtgcctgaggacatctggaggaaggctgaagaggccgtgaatgaggtgaagcggcaggccatgtcggagctgcagaaagccgtgtcggacgcggagcgcaaagcgcacgagctcatcaccacggagcgtgccaagatggagcgggccctggccgaggcgaagcggcaggcctccgaggacgccctgacggtcatcaaccagcaggaggactccagcgagagctgctggaactgcgggcggaaagccagtgagacgtgcagcggctgcaacgcggcacgctactgcgggtccttctgccagcatcgggactgggagaagcatcaccacgtgtgtggccagagcctgcagggccccacagccgtggtggccgacccggtgcctggaccgcccgaagccgcccacagcctgggcccctccctgcctgtgggtgctgccagccccagcgaagccggctctgcggggccttctcgccccggctcccccagcccacctggcccactggacaccgtgccccgctgaccccactggcccctggcctgccggacacagcaccgtgccaaccccacccagctccaggcccaccggatgctgtgcctggcctccgatgcctggcctgccagacactgcgccccgcctgacctgggggagccgaccaattagtcactgctgctactgcccctctccgaaagaagacacagaaccaacaaaaccgcattcagtgcacctgcctcagctacctaatgattccgcgcggagacctcctgacaacgtctcttcaagcatcctcagaagcctcgactgagctttagacagcagagcagatgccgcaggcgcggcggctctgcccacctctcttttcctctctgtctgtctctccccctctgtcttctctatcctctctctctctatgactatcacacactttctcttcaatgaaaaaatcgaattggtggcttatattttcagcaaagaattttggggggttttgtgtgttggcaaaagagctactcagaaatggacaaagaaaacgggggggttctccccctcctgattaaaaagggagaaagaaaactgcgattttatagctggagatctgaacccagctgtgcccctcccccaggggcgtgaggctgatcagcgaagacgggaggaaagatttcgatttctgactcaagatgcatttttggtttcagatttttttttcctgtaatgttaaactctttggctttaagtaaaaatccaaaaagtttttttaaaaaagcaaaggaagcatacttgtgaactaccttgctagctagccagccaaggataccggacacacctctgctccaaaggaaatccaaaaaagcaaacacaagaaatcaaaatccaaaatttgtttgtcactgccaaagtatttttttcactgtttcacttgctcttgggtttgtttggatgtgggtctttttctcttctgttctgattttgtttgtgggtgtcgggatatttgggtgcagagggtttgtgcccagttagaagcgacttttgttctcttctgcgtaggcgttggtgcgtccgccgcgtgtgcgtggtccgtgtgccgttgctccggcctgcgtctccatatgtgtaggaaaggacacgccgtctgtcctcacgccccctgtgacttttcatatttccgttttccacttgtggaaaaaaagtgctaaagttttcttcccagagagagcataattccgaaacaaaactgtgacaatcttttgggttgattctcgactgcttttcgagcatgcggagccagcaggcctccctgaaacactgcttctcggccagcccgtcctcctctacctctctcctctccgcgccctccgacctctctcggccccctcaccccagctccgacctctctcagccccatcgccccaactccaacctctcggccccatcgccccaccgcagctactcccctttcttccaaacttttgcagaaaaaacaaaaaaactacaaacaaaagcagccctctgcctcctccccagggaagaccctgaccgtgtacatagccctggtgctcctgcccagccacccctcagatgcgttcgcctctggccctggggtgtgtctcggtgacgttttctatcagacgtgctccctcccatcctccagccctgcccaccctccctccactcctctcaactgcctcagcgatttcaagaaggaaataaagggataaagaaattcatgcttgcaccgagtacaaggacagacagcaggcacggcccgcagcctggcatctgtgcgtgtggcgtggcccgtggcttggcatctgtgtgcgtggtgtggcccgtggcctggcatctgtgtgcgtggcgtggcccgtggcctggcatctgtgtgtgtggcgtggcccgtggcctggcatctgtgcgcgtggcgtggcccgtggcctggcatctgtgtgcgtggctatcaggagttctaggaactcagtgcaatacgggagtgacccagctactgaaccagccacgaacagcccgccagaggcctgaagctgagcgtgtacgttaatgtgaatgtatatagtctttgcagaggtccaaatgatattcatgatggtaataaacgagatgtttgccaaataaaaaacagaaaccgc

SEQ ID NO: 110 - DNA, 4265 bp, Homo sapiens
agggcagaggacacccagttggtggccgggagggcctcggctttccagggacagaggcccaactccaggacgccccagctggcccagcccctcctctttccctcaaggctgcaggaggtcgggaaaggcagtcctggtagaggcctgtcctgggctccaggttggcccctgagggtggccctcctcatgccggcttcaagactgagggacagggcagccagttcagcctcgggatccacctgtggctccatgtcccagacgcaccctgtgctggagagcggcctcctggcatctgccggctgctccgcaccccggggtcccaggaagggcggcccagccccagtggacaggaaagctaaggcctcagcgatgccggactccccagcggaggtgaagacgcagccccggtccacaccccccagcatgccgcccccaccgcctgccgcatcccagggggccacacgccccccctccttcacgccacacacacatcgagaggacgggcctgcgacgctgccccacggccgttttcatggctgcttaaaatggtctatggtctgtctcttgatgaacggcagcagccactcaccaacagccatcaatggtgcaccgtgcacacccaacggcttcagcaatggcccggccacctcgtccacagcctccttgtccacacagcacctgcccccagcctgcggggcccggcagctcagcaagctcaagcgcttcctcaccacactgcagcagtttggcagcgacatctccccagagattggggagcgcgtgcgcacactggtgctgggcctggtgaactcgacattgacgatcgaggagtttcattccaagcttcaggaggccaccaacttccctctgcggccgtttgtcattcccttcctgaaggcaaacctgcccttgctgcagcgggagctcctgcactgtgcacgcctggccaagcagacgcccgcccagtacttggcccagcatgagcagctcctgctggacgccagcgcctcctcccccatcgactcctcagagctgctactggaagtcaacgagaacggcaagaggaggacgcccgacaggaccaaagagaacgggtcagaccgcgacccgctgcaccccgagcacctcagcaaacggccatgcaccctgaaccctgcccagcgctacagccccagcaacgggccaccgcagcccacaccgccgccgcactaccgcctggaggacatagccatggcccaccacttccgagatgcctaccgccacccagacccccgggagctacgagagcgccatcggccgcttgtggtgcctgggtcccggcaggaagaagtgatcgaccacaagctcacagagcgtgagtgggcagaagagtggaagcacctcaacaacctcctgaactgcatcatggacatggtggagaagacgcggcgctcgctcacggtgctgcgcaggtgccaggaggccgaccgcgaggagctcaaccactgggcgcggcgctacagcgacgccgaggacacaaagaagggccccgctcccgccgcggcccggccccgcagcagctccgccggtcccgaagggcctcagctagacgtgcctcgcgagttcctgccgaggaccctcaccggctacgtgcctgaggacatctggaggaaggctgaagaggccgtgaatgaggtgaagcggcaggccatgtcggagctgcagaaagccgtgtcggacgcggagcgcaaagcgcacgagctcatcaccacggagcgtgccaagatggagcgggccctggccgaggcgaagcggcaggcctccgaggacgccctgacggtcatcaaccagcaggaggactccagcgagagctgctggaactgcgggcggaaagccagtgagacgtgcagcggctgcaacgcggcacgctactgcgggtccttctgccagcatcgggactgggagaagcatcaccacgtgtgtggccagagcctgcagggccccacagccgtggtggccgacccggtgcctggaccgcccgaagccgcccacagcctgggcccctccctgcctgtgggtgctgccagccccagcgaagccggctctgcggggccttctcgccccggctcccccagcccacctggcccactggacaccgtgccccgctgaccccactggcccctggcctgccggacacagcaccgtgccaaccccacccagctccaggcccaccggatgctgtgcctggcctccgatgcctggcctgccagacactgcgccccgcctgacctgggggagccgaccaattagtcactgctgctactgcccctctccgaaagaagacacagaaccaacaaaaccgcattcagtgcacctgcctcagctacctaatgattccgcgcggagacctcctgacaacgtctcttcaagcatcctcagaagcctcgactgagctttagacagcagagcagatgccgcaggcgcggcggctctgcccacctctcttttcctctctgtctgtctctccccctctgtcttctctatcctctctctctctatgactatcacacactttctcttcaatgaaaaaatcgaattggtggcttatattttcagcaaagaattttggggggttttgtgtgttggcaaaagagctactcagaaatggacaaagaaaacgggggggttctccccctcctgattaaaaagggagaaagaaaactgcgattttatagctggagatctgaacccagctgtgcccctcccccaggggcgtgaggctgatcagcgaagacgggaggaaagatttcgatttctgactcaagatgcatttttggtttcagatttttttttcctgtaatgttaaactctttggctttaagtaaaaatccaaaaagtttttttaaaaaagcaaaggaagcatacttgtgaactaccttgctagctagccagccaaggataccggacacacctctgctccaaaggaaatccaaaaaagcaaacacaagaaatcaaaatccaaaatttgtttgtcactgccaaagtatttttttcactgtttcacttgctcttgggtttgtttggatgtgggtctttttctcttctgttctgattttgtttgtgggtgtcgggatatttgggtgcagagggtttgtgcccagttagaagcgacttttgttctcttctgcgtaggcgttggtgcgtccgccgcgtgtgcgtggtccgtgtgccgttgctccggcctgcgtctccatatgtgtaggaaaggacacgccgtctgtcctcacgccccctgtgacttttcatatttccgttttccacttgtggaaaaaaagtgctaaagttttcttcccagagagagcataattccgaaacaaaactgtgacaatcttttgggttgattctcgactgcttttcgagcatgcggagccagcaggcctccctgaaacactgcttctcggccagcccgtcctcctctacctctctcctctccgcgccctccgacctctctcggccccctcaccccagctccgacctctctcagccccatcgccccaactccaacctctcggccccatcgccccaccgcagctactcccctttcttccaaacttttgcagaaaaaacaaaaaaactacaaacaaaagcagccctctgcctcctccccagggaagaccctgaccgtgtacatagccctggtgctcctgcccagccacccctcagatgcgttcgcctctggccctggggtgtgtctcggtgacgttttctatcagacgtgctccctcccatcctccagccctgcccaccctccctccactcctctcaactgcctcagcgatttcaagaaggaaataaagggataaagaaattcatgcttgcaccgagtacaaggacagacagcaggcacggcccgcagcctggcatctgtgcgtgtggcgtggcccgtggcttggcatctgtgtgcgtggtgtggcccgtggcctggcatctgtgtgcgtggcgtggcccgtggcctggcatctgtgtgtgtggcgtggcccgtggcctggcatctgtgcgcgtggcgtggcccgtggcctggcatctgtgtgcgtggctatcaggagttctaggaactcagtgcaatacgggagtgacccagctactgaaccagccacgaacagcccgccagaggcctgaagctgagcgtgtacgttaatgtgaatgtatatagtctttgcagaggtccaaatgatattcatgatggtaataaacgagatgtttgccaaataaaaaacagaaaccgc

SEQ ID NO: 111 - DNA, 1128 bp, Homo sapiens
gcgtgggcagggggcgggcccgggagttggaacagagggcacagacggcccctcctcggaggggagggaccggagccggggcctttttctttaagactcgcagcactggatcccagaacttagtctgcgcggcggcattgacactagctgggctcctcggggcgcgccccaggtggtccgaagcccggtccgccctccacgcaggtgccccgcgctccccgctcagccatgtcgtcctgcagccgcgtggcgctggtgaccggggccaacaggggcatcggcttggccatcgcgcgcgaactgtgccgacagttctctggggatgtggtgctcaccgcgcgggacgtggcgcggggccaggcggccgtgcagcagctgcaggcggagggcctgagcccgcgcttccaccaactggacatcgacgacttgcagagcatccgcgccctgcgcgacttcctgcgcaaggagtacggggggctcaacgtactggtcaacaacgcggccgtcgccttcaagagtgatgatccaatgccctttgacattaaagctgagatgacactgaagacaaatttttttgccactagaaacatgtgcaacgagttactgccgataatgaaacctcatgggagagtggtgaatatcagtagtttgcagtgtttaagggcttttgaaaactgcagtgaagatctgcaggaaaggttccacagtgagacactcacagaaggagacctggtggatctcatgaaaaagtttgtggaggacacaaaaaatgaggtgcatgagagggaaggctggcccaactcaccttatggggtgtccaagttgggggtcacggtcttatcgaggatcctggccaggcgtctggatgagaagaggaaagctgacaggattctggtgaatgcgtgctgcccaggaccagtgaagacagacatggatgggaaagacagcatcaggactgtggaggagggggctgagacccctgtctacttggccctcttgcctccagatgccactgagccacaaggccagttggtccatgacaaagttgtgcaaaactggtaaacgtctgcttcggagcttgctgcttaataaatgttggtggaatgaatgaaaaaaaaaaaaaaaaaa

SEQ ID NO: 112 - DNA, 925 bp, Homo sapiens
atgggcaaaggcttccctggaatctcccacactgtctgctccctataaaaggcaggcagatgggccagaggagcagagaggctgagaccaacccagaaaccaccacctctcacgccaaagctcacaccttcagcctccaacatgaaggtctccgcagcacttctgtggctgctgctcatagcagctgccttcagcccccaggggctcgctgggccagcttctgtcccaaccacctgctgctttaacctggccaataggaagataccccttcagcgactagagagctacaggagaatcaccagtggcaaatgtccccagaaagctgtgatcttcaagaccaaactggccaaggatatctgtgccgaccccaagaagaagtgggtgcaggattccatgaagtatctggaccaaaaatctccaactccaaagccataaataatcaccatttttgaaaccaaaccagagcctgagtgttgcctaatttgttttcccttcttacaatgcattctgaggtaacctcattatcagtccaaagggcatgggttttattatatatatatatttttttttttaaaaaaaaaacgtattgcatttaatttattgaggctttaaaacttatcctccatgaatatcagttatttttaaactgtaaagctttgtgcagattctttaccccctgggagccccaattcgatcccctgtcacgtgtgggcaatgttccccctctcctctcttcctccctggaatcttgtaaaggtcctggcaaagatgatcagtatgaaaatgtcattgttcttgtgaacccaaagtgtgactcattaaatggaagtaaatgttgttttaggaatacataaagtatgtgcatattttattatagtcactagttgtaatttttttgtgggaaatccacactgagctgaggggg

SEQ ID NO: 113 - DNA, 760 bp, Homo sapiens
gaggaaccgagaggctgagactaacccagaaacatccaattctcaaactgaagctcgcactctcgcctccagcatgaaagtctctgccgcccttctgtgcctgctgctcatagcagccaccttcattccccaagggctcgctcagccagatgcaatcaatgccccagtcacctgctgttataacttcaccaataggaagatctcagtgcagaggctcgcgagctatagaagaatcaccagcagcaagtgtcccaaagaagctgtgatcttcaagaccattgtggccaaggagatctgtgctgaccccaagcagaagtgggttcaggattccatggaccacctggacaagcaaacccaaactccgaagacttgaacactcactccacaacccaagaatctgcagctaacttattttcccctagctttccccagacaccctgttttattttattataatgaattttgtttgttgatgtgaaacattatgccttaagtaatgttaattcttatttaagttattgatgttttaagtttatctttcatggtactagtgttttttagatacagagacttggggaaattgcttttcctcttgaaccacagttctacccctgggatgttttgagggtctttgcaagaatcattaatacaaagaattttttttaacattccaatgcattgctaaaatattattgtggaaatgaatattttgtaactattacaccaaataaatatatttttgtacaaaaaaaaaaaaaaa

SEQ ID NO: 114 - DNA, 799 bp, Homo sapiens
cactcccaaagaactgggtactcaacactgagcagatctgttctttgagctaaaaaccatgtgctgtaccaagagtttgctcctggctgctttgatgtcagtgctgctactccacctctgcggcgaatcagaagcagcaagcaactttgactgctgtcttggatacacagaccgtattcttcatcctaaatttattgtgggcttcacacggcagctggccaatgaaggctgtgacatcaatgctatcatctttcacacaaagaaaaagttgtctgtgtgcgcaaatccaaaacagacttgggtgaaatatattgtgcgtctcctcagtaaaaaagtcaagaacatgtaaaaactgtggcttttctggaatggaattggacatagcccaagaacagaaagaaccttgctggggttggaggtttcacttgcacatcatggagggtttagtgcttatctaatttgtgcctcactggacttgtccaattaatgaagttgattcatattgcatcatagtttgctttgtttaagcatcacattaaagttaaactgtattttatgttatttatagctgtaggttttctgtgtttagctatttaatactaattttccataagctattttggtttagtgcaaagtataaaattatatttgggggggaataagattatatggactttcttgcaagcaacaagctattttttaaaaaaactatttaacattcttttgtttatattgttttgtctcctaaattgttgtaattgcattataaaataagaaaaacattaataagacaaatatt

SEQ ID NO: 115 - DNA, 1351 bp, Homo sapiens
gtgatggagagcaccagcaaagccttagggcccatccctggcctcctgttacccacagaggggtaggcccttggctctcttccactatgacgtcagcttccattcttcctttcttatagacaattttccatttcaaggaaatcagagcccttaatagttcagtgaggtcactttgctgagcacaatcccatacccttcagcctctgctccacagagcctaagcaaaagatagaaactcacaacttccttgttttgttatctggaaattatcccaggatctggtgcttactcagcatattcaaggaaggtcttacttcattcttccttgattgtgaccatgcccaggctctctgctccctataaaaggcaggcagagccaccgaggagcagagaggttgagaacaacccagaaaccttcacctctcatgctgaagctcacacccttgccctccaagatgaaggtttctgcagcgcttctgtgcctgctgctcatggcagccactttcagccctcagggacttgctcagccagattcagtttccattccaatcacctgctgctttaacgtgatcaataggaaaattcctatccagaggctggagagctacacaagaatcaccaacatccaatgtcccaaggaagctgtgatcttcaagaccaaacggggcaaggaggtctgtgctgaccccaaggagagatgggtcagggattccatgaagcatctggaccaaatatttcaaaatctgaagccatgagccttcatacatggactgagagtcagagcttgaagaaaagcttatttattttccccaacctcccccaggtgcagtgtgacattattttattataacatccacaaagagattatttttaaataatttaaagcataatatttcttaaaaagtatttaattatatttaagttgttgatgttttaactctatctgtcatacatcctagtgaatgtaaaatgcaaaatcctggtgatgtgttttttgtttttgttttcctgtgagctcaactaagttcacggcaaaatgtcattgttctccctcctacctgtctgtagtgttgtggggtcctcccatggatcatcaaggtgaaacactttggtattctttggcaatcagtgctcctgtaagtcaaatgtgtgctttgtactgctgttgttgaaattgatgttactgtatataactatggaattttgaaaaaaaatttcaaaaagaaaaaaatatatataatttaaaactaaaaaaaaaaaaaaaaaaaaaaaaaaaaaaaaaaaaaaaaaaaaaaaaaaaaaaaaaaaaaaaaaaaaaaaaaaaaaaaaaaaaaaaaaaaaaaaaaaaaaa

SEQ ID NO: 116 - DNA, 6666 bp, Homo sapiens
gcctgccggctgcagacgcctgcgagcaggttgtttttataagaggcgtcattggcgcccgagctgtgaccgccgccactggggcagccagcacaatcgggcggaggtggcgctgccccttcagacctgaaagatgtctgaaaattccagtgacagtgattcatcttgtggttggactgtcatcagtcatgaggggtcagatatagaaatgttgaattctgtgacccccactgacagctgtgagcccgccccagaatgttcatctttagagcaagaggagcttcaagcattgcagatagagcaaggagaaagcagccaaaatggcacagtgcttatggaagaaactgcttatccagctttggaggaaaccagctcaacaattgaggcagaggaacaaaagatacccgaagacagtatctatattggaactgccagtgatgattctgatattgttacccttgagccacctaagttagaagaaattggaaatcaagaagttgtcattgttgaagaagcacagagttcagaagactttaacatgggctcttcctctagcagccagtatactttctgtcagccagaaactgtattttcatctcagcctagtgacgatgaatcaagtagtgatgaaaccagtaatcagcccagtcctgcctttagacgacgccgtgctaggaagaagaccgtttctgcttcagaatctgaagaccggctagttgctgaacaagaaactgaaccttctaaggagttgagtaaacgtcagttcagtagtggtctcaataagtgtgttatacttgctttggtgattgcaatcagcatgggatttggccatttctatggcacaattcagattcagaagcgtcaacagttagtcagaaagatacatgaagatgaattgaatgatatgaaggattatctttcccagtgtcaacaggaacaagaatcttttatagattataagtcattgaaagaaaatcttgcaaggtgttggacacttactgaagcagagaagatgtcctttgaaactcagaaaacgaaccttgctacagaaaatcagtatttaagagtatccttggagaaggaagaaaaagccttatcctcattacaggaagagttaaacaaactaagagaacagattagaatattggaagataaagggacaagtactgaattagttaaagaaaatcagaaacttaagcagcatttggaagaggaaaagcagaaaaaacacagctttcttagtcaaagggagactctgttgacagaagcaaagatgctaaagagagaactggagagagaacgactagtaactacggctttaaggggggaactccagcagttaagtggtagtcagttacatggcaagtcagattctcccaatgtatatactgaaaaaaaggaaatagcaatcttacgggaaagactcactgagctggaacggaagctaaccttcgaacagcagcgttctgatttgtgggaaagattgtatgttgaggcaaaagatcaaaatggaaaacaaggaacagatggaaaaaagaaagggggcagaggaagccacagggctaaaaataagtcaaaggaaacatttttgggttcagttaaggaaacatttgatgccatgaagaattctaccaaggagtttgtaaggcatcataaagagaaaattaagcaggctaaagaagctgtgaaggaaaatctgaaaaaattctcagattcagttaaatccactttcagacactttaaagataccaccaagaatatctttgatgaaaagggtaataaaagatttggtgctacaaaagaagcagctgaaaaaccaagaacagtttttagtgactatttacatccacagtataaggcacctacagaaaaccatcataatagaggccctactatgcaaaatgatggaaggaaagaaaagccagttcactttaaagaattcagaaaaaatacaaattcaaagaaatgcagtcctgggcatgattgtagagaaaattctcattctttcagaaaggcttgttctggtgtatttgattgtgctcaacaagagtccatgagcctttttaacacagtggtgaatcctataaggatggatgaatttagacagataattcaaaggtacatgttaaaagaactggatactttttgtcactggaacgaacttgatcagttcatcaataagtttttcctaaacggtgtctttatacatgatcagaagctcttcactgactttgttaatgatgttaaagattatcttagaaacatgaaggaatatgaagtagataatgatggagtatttgagaagttggatgaatatatatatagacacttctttggtcacactttttcccctccatatggacccaggtcggtttacataaaaccgtgtcattacagtagtttgtaacatttgtagattggatagcatttttatgatttgatgagtttcttgtaaggttaccgtttctaagagttgtgctttatggccactgagagaattcagaataaattgaaagatggagtctaaaaattattagctgttacaaatggaacatttcattataacgtgatcactttgacttgagcaaatggtttaatttttatcttaaaaatcagttaagaatatataaaatcctactttggccaagtttgtttcttttcattatagtttatatgaaaagatcaccttaagtgaaattattttcctttaatcttttatgtatttattcacttttggaagctaggaatgagcaacacaaattttactctgaagtcagaagagctcatatataataattctaatgtcccacctattttcacttgtccattccatgtaccagcttagttatgatacttagtcacataattatctttgataaaggtagaggcacaaagaggcaaactaagcaagtcaaattctaatgtgtgtacttcataataattttttatccattttcatctttatattctgtaacatgaaacttacctaatcttcaaatgttagcttcattttttacctttgaaatacttaatctttctgaataaatataatgtgtctataaaataatgagactgattctggtgtctttagtcattaagctggtatctagtcctataatgaacaaaggtgaagctgccttgaggagacaagtgaaaaatttttgcttcaaaggagctcacaagctaagtaaataaatgaaattaaggtatggggcatggtggcctcaggctgtctggaggtgtttggaaaggcttcttgagtgaggtggcctttgaactgaacttagtttttaaagtagcttttggaagagaaatgaggatttgctatgcagacagggaagggaatttcacttaaaaggaaggtcatttggagatgtgaagatacactgctttaaggaagcagggtagagctggaggataagagatgcagaccatgaagggccccattttatgctaaaggttttgtcctgtaggacatggagaacttctgaagaattttcaaggcgggtgggataagattatattgtattttagattacagtagtccccccttatcttcaggatatatgttccaagacccccagtggatgctggaaaccagggatagaacataattctatatatactatgcatgaatttctttttccttctttacaatctcacacataggtttgttcttactatagatcttaccaatctcagcatacttttatttctcttgagaaccttcaccctttcacttaaaggaggcgctttatagcttctctttggcatatccaaatgccagcatcactgttgtattttggggtcattattaagttacttaatcatccttaatccttatcttagggatacttgaacacaaacactgtggtaggataacagtatatctgattaacagactgctactaggtgattaatgggtgggtagtgtaaatacacaagaaaaggatgattcacatcccatgtgggatggagcagaactgcattatttcattacattactcagaacaggcatataattgaaaacttatgaattatttttttttaattatttgagatggaatcttgctttgtcagccaggctggagtgcagtgacacgatctcagctcactgcaacctctgtctcctgggttcaggtgattctcctccctagtctcccaagtagctgggactataggcacgtgccaccacacccggctaattttcatatttttagtagagatggggtttcaccatgttggccaggctgttcttgaaatcctgacctcaagtgatccacacatgtctacctcccaaagtgctgggattacagtcgtgagccactgtaccccgcctaaaactgatgaattatttctgaaattttctatttaacattttcagaccacagttgaccacaggtaacggaaacctcaatcacagaaagtaaagccgtggatacggtgggactaatgtattggtagcagcctagaggattgatgggaaaggtatgaagctagaaggtggtcaatataatacagacatgagctgatgaacatctaaactgggactatactagtaggagaggaaaggaaaaaacatttggaaaatagtaacattgatatttcttgtgaaggagaagtagaaagtaacagtgacttctagatttctgggttgggtcatcttgttggatagtagtaccactgagatagggaattcaaggtttggggcaagggtaattggagatgagaattgtgtttggaggtaactactgacattcaagtggagagggttagttggcagttagttctatggtcatctcttttgccgagactgtatatttatcagactcctgggagaacaccaacatccatggggttgtagggaaggctaaggacaggagtggggagtggtaccttgaaaatccaaaagccatctcaagtaaaaggaataaatgtgtcatgctttttaaaaagttgatgtgcggaaaatgttttcttggcttggaaactgggcggccaggggatgacagtatggacttccagtgaagtagtgacggaagcctgatcatagacattaaggaaagcggtgtaggtgttgtgagcttttgctgtaagaaaaagttgagacttttgttttgctttgtttgtgagagatgtgtatgtatttctgctgagtgataaagccagcggggagggactgatttttataggaaaggaggaaaaataatggaaacacatctcattattttattgtcacatttcttttctttgttatcttttgagtgtttcccttttttgccagtagagttattgtctattttttctttctataggacaaaaaaactaatacagactcctttatttttatatggatatactaggattgtaattcagatatttaatatcttttatcagtgttcagatcatagattaatggagaaaacatttaaaattgttttaaatttaaatacattgaactctaacatagatgaaaaatgtgtttactgctttcagtcgacctgataaaaagcaacgtatggtaaatattgaaaactccaggcatcgaaaacaagagcagaagcaccttcagccacagccttataaaagggaaggtaaatggcataaatatggtcgcactaatggaagacaaatggcaaatcttgaaatagaattggggcaattaccttttgatcctcaatactgattcacaattgagttaaattagacaactgtaagagaaaaatttatgctttgtataatgtttggtattgaaactaatgaaattaccaagatgacaatgtcttttcttttgtttctaagtatcagtttgataactttatattattcctcagaagcattagttaaaagtctactaacctgcattttcctgtagtttagcttcgttgaattttttttgacactggaaatgttcaactgtagttttattaaggaagccaggcatgcaacagattttgtgcatgaaatgagacttcctttcagtgtaagagcttaaagcaagctcagtcatacatgacaaagtgtaattaacactgatgtttgtgttaaatttgcagcagagcttgagaaaagtacattgttctggaatttcatcattaacattttataatcttacactcacttcttgtctttttgtgggttcaagagccctctgacttgtgaagaatttgctgccctcttaagagcttgctgacttgttttcttgtgaaattttttgcacatctgaatatcgtggaagaaacaataaaactacaccatgaggaaaactaaaggtctttatttaaaatctggcattgtattaacatgtaattttatactatgtggtattttatacatttcctcagtagtgatatttggtaaagcagttcatacagcttttttctaagttccatgaatcttacccagtgtttaccgaagtatttaagcagcatctgaatatttccacccagcaatgttaatttatctaggaaagttcagaatttcatcttcatgttgaatttcccttttaacttccgttcatagacatatatgtgacttccaattcgaccctctggcaagtgagtgtggaagaaaacagcagttcttttataattgcttgaaattaggaaagcgcttatttcctagaagcaaataaatgtttaagtaaataaaggctacattttgctg

SEQ ID NO: 117 - DNA, 6698 bp, Homo sapiens
acggcatgcactgcggcgcccagccggtcaccgcctgccggctgcagacgcctgcgagcaggttgtttttataagaggcgtcattggcgcccgagctgtgaccgccgccactggggcagccagcacaatcgggcggaggtggcgctgccccttcagacctgaaagatgtctgaaaattccagtgacagtgattcatcttgtggttggactgtcatcagtcatgaggggtcagatatagaaatgttgaattctgtgacccccactgacagctgtgagcccgccccagaatgttcatctttagagcaagaggagcttcaagcattgcagatagagcaaggagaaagcagccaaaatggcacagtgcttatggaagaaactgcttatccagctttggaggaaaccagctcaacaattgaggcagaggaacaaaagatacccgaagacagtatctatattggaactgccagtgatgattctgatattgttacccttgagccacctaagttagaagaaattggaaatcaagaagttgtcattgttgaagaagcacagagttcagaagactttaacatgggctcttcctctagcagccagtatactttctgtcagccagaaactgtattttcatctcagcctagtgacgatgaatcaagtagtgatgaaaccagtaatcagcccagtcctgcctttagacgacgccgtgctaggaagaagaccgtttctgcttcagaatctgaagaccggctagttgctgaacaagaaactgaaccttctaaggagttgagtaaacgtcagttcagtagtggtctcaataagtgtgttatacttgctttggtgattgcaatcagcatgggatttggccatttctatggcacaattcagattcagaagcgtcaacagttagtcagaaagatacatgaagatgaattgaatgatatgaaggattatctttcccagtgtcaacaggaacaagaatcttttatagattataagtcattgaaagaaaatcttgcaaggtgttggacacttactgaagcagagaagatgtcctttgaaactcagaaaacgaaccttgctacagaaaatcagtatttaagagtatccttggagaaggaagaaaaagccttatcctcattacaggaagagttaaacaaactaagagaacagattagaatattggaagataaagggacaagtactgaattagttaaagaaaatcagaaacttaagcagcatttggaagaggaaaagcagaaaaaacacagctttcttagtcaaagggagactctgttgacagaagcaaagatgctaaagagagaactggagagagaacgactagtaactacggctttaaggggggaactccagcagttaagtggtagtcagttacatggcaagtcagattctcccaatgtatatactgaaaaaaaggaaatagcaatcttacgggaaagactcactgagctggaacggaagctaaccttcgaacagcagcgttctgatttgtgggaaagattgtatgttgaggcaaaagatcaaaatggaaaacaaggaacagatggaaaaaagaaagggggcagaggaagccacagggctaaaaataagtcaaaggaaacatttttgggttcagttaaggaaacatttgatgccatgaagaattctaccaaggagtttgtaaggcatcataaagagaaaattaagcaggctaaagaagctgtgaaggaaaatctgaaaaaattctcagattcagttaaatccactttcagacactttaaagataccaccaagaatatctttgatgaaaagggtaataaaagatttggtgctacaaaagaagcagctgaaaaaccaagaacagtttttagtgactatttacatccacagtataaggcacctacagaaaaccatcataatagaggccctactatgcaaaatgatggaaggaaagaaaagccagttcactttaaagaattcagaaaaaatacaaattcaaagaaatgcagtcctgggcatgattgtagagaaaattctcattctttcagaaaggcttgttctggtgtatttgattgtgctcaacaagagtccatgagcctttttaacacagtggtgaatcctataaggatggatgaatttagacagataattcaaaggtacatgttaaaagaactggatactttttgtcactggaacgaacttgatcagttcatcaataagtttttcctaaacggtgtctttatacatgatcagaagctcttcactgactttgttaatgatgttaaagattatcttagaaacatgaaggaatatgaagtagataatgatggagtatttgagaagttggatgaatatatatatagacacttctttggtcacactttttcccctccatatggacccaggtcggtttacataaaaccgtgtcattacagtagtttgtaacatttgtagattggatagcatttttatgatttgatgagtttcttgtaaggttaccgtttctaagagttgtgctttatggccactgagagaattcagaataaattgaaagatggagtctaaaaattattagctgttacaaatggaacatttcattataacgtgatcactttgacttgagcaaatggtttaatttttatcttaaaaatcagttaagaatatataaaatcctactttggccaagtttgtttcttttcattatagtttatatgaaaagatcaccttaagtgaaattattttcctttaatcttttatgtatttattcacttttggaagctaggaatgagcaacacaaattttactctgaagtcagaagagctcatatataataattctaatgtcccacctattttcacttgtccattccatgtaccagcttagttatgatacttagtcacataattatctttgataaaggtagaggcacaaagaggcaaactaagcaagtcaaattctaatgtgtgtacttcataataattttttatccattttcatctttatattctgtaacatgaaacttacctaatcttcaaatgttagcttcattttttacctttgaaatacttaatctttctgaataaatataatgtgtctataaaataatgagactgattctggtgtctttagtcattaagctggtatctagtcctataatgaacaaaggtgaagctgccttgaggagacaagtgaaaaatttttgcttcaaaggagctcacaagctaagtaaataaatgaaattaaggtatggggcatggtggcctcaggctgtctggaggtgtttggaaaggcttcttgagtgaggtggcctttgaactgaacttagtttttaaagtagcttttggaagagaaatgaggatttgctatgcagacagggaagggaatttcacttaaaaggaaggtcatttggagatgtgaagatacactgctttaaggaagcagggtagagctggaggataagagatgcagaccatgaagggccccattttatgctaaaggttttgtcctgtaggacatggagaacttctgaagaattttcaaggcgggtgggataagattatattgtattttagattacagtagtccccccttatcttcaggatatatgttccaagacccccagtggatgctggaaaccagggatagaacataattctatatatactatgcatgaatttctttttccttctttacaatctcacacataggtttgttcttactatagatcttaccaatctcagcatacttttatttctcttgagaaccttcaccctttcacttaaaggaggcgctttatagcttctctttggcatatccaaatgccagcatcactgttgtattttggggtcattattaagttacttaatcatccttaatccttatcttagggatacttgaacacaaacactgtggtaggataacagtatatctgattaacagactgctactaggtgattaatgggtgggtagtgtaaatacacaagaaaaggatgattcacatcccatgtgggatggagcagaactgcattatttcattacattactcagaacaggcatataattgaaaacttatgaattatttttttttaattatttgagatggaatcttgctttgtcagccaggctggagtgcagtgacacgatctcagctcactgcaacctctgtctcctgggttcaggtgattctcctccctagtctcccaagtagctgggactataggcacgtgccaccacacccggctaattttcatatttttagtagagatggggtttcaccatgttggccaggctgttcttgaaatcctgacctcaagtgatccacacatgtctacctcccaaagtgctgggattacagtcgtgagccactgtaccccgcctaaaactgatgaattatttctgaaattttctatttaacattttcagaccacagttgaccacaggtaacggaaacctcaatcacagaaagtaaagccgtggatacggtgggactaatgtattggtagcagcctagaggattgatgggaaaggtatgaagctagaaggtggtcaatataatacagacatgagctgatgaacatctaaactgggactatactagtaggagaggaaaggaaaaaacatttggaaaatagtaacattgatatttcttgtgaaggagaagtagaaagtaacagtgacttctagatttctgggttgggtcatcttgttggatagtagtaccactgagatagggaattcaaggtttggggcaagggtaattggagatgagaattgtgtttggaggtaactactgacattcaagtggagagggttagttggcagttagttctatggtcatctcttttgccgagactgtatatttatcagactcctgggagaacaccaacatccatggggttgtagggaaggctaaggacaggagtggggagtggtaccttgaaaatccaaaagccatctcaagtaaaaggaataaatgtgtcatgctttttaaaaagttgatgtgcggaaaatgttttcttggcttggaaactgggcggccaggggatgacagtatggacttccagtgaagtagtgacggaagcctgatcatagacattaaggaaagcggtgtaggtgttgtgagcttttgctgtaagaaaaagttgagacttttgttttgctttgtttgtgagagatgtgtatgtatttctgctgagtgataaagccagcggggagggactgatttttataggaaaggaggaaaaataatggaaacacatctcattattttattgtcacatttcttttctttgttatcttttgagtgtttcccttttttgccagtagagttattgtctattttttctttctataggacaaaaaaactaatacagactcctttatttttatatggatatactaggattgtaattcagatatttaatatcttttatcagtgttcagatcatagattaatggagaaaacatttaaaattgttttaaatttaaatacattgaactctaacatagatgaaaaatgtgtttactgctttcagtcgacctgataaaaagcaacgtatggtaaatattgaaaactccaggcatcgaaaacaagagcagaagcaccttcagccacagccttataaaagggaaggtaaatggcataaatatggtcgcactaatggaagacaaatggcaaatcttgaaatagaattggggcaattaccttttgatcctcaatactgattcacaattgagttaaattagacaactgtaagagaaaaatttatgctttgtataatgtttggtattgaaactaatgaaattaccaagatgacaatgtcttttcttttgtttctaagtatcagtttgataactttatattattcctcagaagcattagttaaaagtctactaacctgcattttcctgtagtttagcttcgttgaattttttttgacactggaaatgttcaactgtagttttattaaggaagccaggcatgcaacagattttgtgcatgaaatgagacttcctttcagtgtaagagcttaaagcaagctcagtcatacatgacaaagtgtaattaacactgatgtttgtgttaaatttgcagcagagcttgagaaaagtacattgttctggaatttcatcattaacattttataatcttacactcacttcttgtctttttgtgggttcaagagccctctgacttgtgaagaatttgctgccctcttaagagcttgctgacttgttttcttgtgaaattttttgcacatctgaatatcgtggaagaaacaataaaactacaccatgaggaaaactaaaggtctttatttaaaatctggcattgtattaacatgtaattttatactatgtggtattttatacatttcctcagtagtgatatttggtaaagcagttcatacagcttttttctaagttccatgaatcttacccagtgtttaccgaagtatttaagcagcatctgaatatttccacccagcaatgttaatttatctaggaaagttcagaatttcatcttcatgttgaatttcccttttaacttccgttcatagacatatatgtgacttccaattcgaccctctggcaagtgagtgtggaagaaaacagcagttcttttataattgcttgaaattaggaaagcgcttatttcctagaagcaaataaatgtttaagtaaataaaggctacattttgctg

SEQ ID NO: 118 - DNA, 1530 bp, Homo sapiens
gttcacaatctcttccacaaaacatgcagttaaatatctgaggatattcagggacttggatttggtggcaggagatcaacataaaccaagacaaggaagaagtcaaagaaatgaatcaagtagattctctgggatataagaggcagccgaagagttcacaagtgtgaagcctggaagccggcgggtgccgctgtgtaggaaagaagctaaagcacttccagagcctgtccggagctcagaggttcggaagacttatcgaccatggagcgcgcgtcctgcttgttgctgctgctgctgccgctggtgcacgtctctgcgaccacgccagaaccttgtgagctggacgatgaagatttccgctgcgtctgcaacttctccgaacctcagcccgactggtccgaagccttccagtgtgtgtctgcagtagaggtggagatccatgccggcggtctcaacctagagccgtttctaaagcgcgtcgatgcggacgccgacccgcggcagtatgctgacacggtcaaggctctccgcgtgcggcggctcacagtgggagccgcacaggttcctgctcagctactggtaggcgccctgcgtgtgctagcgtactcccgcctcaaggaactgacgctcgaggacctaaagataaccggcaccatgcctccgctgcctctggaagccacaggacttgcactttccagcttgcgcctacgcaacgtgtcgtgggcgacagggcgttcttggctcgccgagctgcagcagtggctcaagccaggcctcaaggtactgagcattgcccaagcacactcgcctgccttttcctgcgaacaggttcgcgccttcccggcccttaccagcctagacctgtctgacaatcctggactgggcgaacgcggactgatggcggctctctgtccccacaagttcccggccatccagaatctagcgctgcgcaacacaggaatggagacgcccacaggcgtgtgcgccgcactggcggcggcaggtgtgcagccccacagcctagacctcagccacaactcgctgcgcgccaccgtaaaccctagcgctccgagatgcatgtggtccagcgccctgaactccctcaatctgtcgttcgctgggctggaacaggtgcctaaaggactgccagccaagctcagagtgctcgatctcagctgcaacagactgaacagggcgccgcagcctgacgagctgcccgaggtggataacctgacactggacgggaatcccttcctggtccctggaactgccctcccccacgagggctcaatgaactccggcgtggtcccagcctgtgcacgttcgaccctgtcggtgggggtgtcgggaaccctggtgctgctccaaggggcccggggctttgcctaagatccaagacagaataatgaatggactcaaactgccttggcttcaggggagtcccgtcaggacgttgaggacttttcgaccaattcaaccctttgccccacctttattaaaatcttaaacaacgaaaaaaaaaaaaaaaaa

SEQ ID NO: 119 - DNA, 1623 bp, Homo sapiens
aacagggcattcaccgcctggggcgcctgagtcatcaggacactgccaggagacacagaaccctagatgccctgcagaatccttcctgttacggtccccctccctgaaacatccttcattgcaatatttccaggaaaggaagggggctggctcggaggaagagaggtggggaggtgatcagggttcacagaggagggaactgaatgacatcccaggattacataaactgtcagaggcagccgaagagttcacaagtgtgaagcctggaagccggcgggtgccgctgtgtaggaaagaagctaaagcacttccagagcctgtccggagctcagaggttcggaagacttatcgaccatggagcgcgcgtcctgcttgttgctgctgctgctgccgctggtgcacgtctctgcgaccacgccagaaccttgtgagctggacgatgaagatttccgctgcgtctgcaacttctccgaacctcagcccgactggtccgaagccttccagtgtgtgtctgcagtagaggtggagatccatgccggcggtctcaacctagagccgtttctaaagcgcgtcgatgcggacgccgacccgcggcagtatgctgacacggtcaaggctctccgcgtgcggcggctcacagtgggagccgcacaggttcctgctcagctactggtaggcgccctgcgtgtgctagcgtactcccgcctcaaggaactgacgctcgaggacctaaagataaccggcaccatgcctccgctgcctctggaagccacaggacttgcactttccagcttgcgcctacgcaacgtgtcgtgggcgacagggcgttcttggctcgccgagctgcagcagtggctcaagccaggcctcaaggtactgagcattgcccaagcacactcgcctgccttttcctgcgaacaggttcgcgccttcccggcccttaccagcctagacctgtctgacaatcctggactgggcgaacgcggactgatggcggctctctgtccccacaagttcccggccatccagaatctagcgctgcgcaacacaggaatggagacgcccacaggcgtgtgcgccgcactggcggcggcaggtgtgcagccccacagcctagacctcagccacaactcgctgcgcgccaccgtaaaccctagcgctccgagatgcatgtggtccagcgccctgaactccctcaatctgtcgttcgctgggctggaacaggtgcctaaaggactgccagccaagctcagagtgctcgatctcagctgcaacagactgaacagggcgccgcagcctgacgagctgcccgaggtggataacctgacactggacgggaatcccttcctggtccctggaactgccctcccccacgagggctcaatgaactccggcgtggtcccagcctgtgcacgttcgaccctgtcggtgggggtgtcgggaaccctggtgctgctccaaggggcccggggctttgcctaagatccaagacagaataatgaatggactcaaactgccttggcttcaggggagtcccgtcaggacgttgaggacttttcgaccaattcaaccctttgccccacctttattaaaatcttaaacaacgaaaaaaaaaaaaaaaaa

SEQ ID NO: 120 - DNA, 1911 bp, Homo sapiens
cggggaagtgagagtcggggatcagtcctgcaagctacggagtcactacagggagaggtctcatcactagaaatagccgaagaacctgcagcctcaaccagcgttaaggaggacgtgccgtttctagggagtcttagtcggggctcaccagcttcctgcattttctgaccggctccaggaatagaaccaaaagaagctgaacaaggaagcagcgcggcaccaagaaaagcagaagtcggggccttggaggcgtgactttcccctcgggtccaggtagggcctggagctgctgcaagtgccgcctgtgctggggaagggaccatgtggctgccttgggctctgttgcttctctgggtcccaggatgttttgctctgagcaaatgcaggaccgtggcgggccccgtggggggatccctgagtgtgcagtgtccctatgagaaggaacacaggaccctcaacaaatactggtgcagaccaccacagattttcctatgtgacaagattgtggagaccaaagggtcagcaggaaaaaggaacggccgagtgtccatcagggacagtcctgcaaacctcagcttcacagtgaccctggagaatctcacagaggaggatgcaggcacctactggtgtggggtggatacaccatggctccgagactttcatgatcccgttgtcgaggttgaggtgtccgtgttcccggcatcaacgtcaatgacacctgcaagtatcactgcggccaagacctcaacaatcacaactgcatttccacctgtatcatccactaccctgtttgcagtgggtgccacccacagtgccagcatccaggaggaaactgaggaggtggtgaactcacagctcccgctgctcctctccctgctggcattgttgctgcttctgttggtgggggcctccctgctagcctggaggatgtttcagaaatggatcaaagctggtgaccattcagagctgtcccagaaccccaagcaggctgccacgcagagtgagctgcactacgcaaatctggagctgctgatgtggcctctgcaggaaaagccagcaccaccaagggaggtggaggtggaatacagcactgtggcctcccccagggaagaacttcactatgcctcggtggtgtttgattctaacaccaacaggatagctgctcagaggcctcgggaggaggaaccagattcagattacagtgtgataaggaagacataggcttttgtcctgcctcgccatcggagctctcatgggccccaggaagtccagggacagctcccttatacctggcccacgtccttctcagcctgccctcgacaacagtgaccaacagacaggcagctgggtttcccaggccatccctctgttgccatcagcttgattggcttccccgagggccagcagggctgggggctccggagagcagcaggaagcactcccagccaccagtgcctgtcacctctttcccctttgcccctgcttcatcccagctctgtgtgtggaggacaaagcttcttcctgcgtggctccaggaaaagatgtggctcacgtaggtggcacctgccaatagctttgtcaatcacagccccataggaacgtctggaattgcttgggagttggggagaactgtcaagaagagtgaagagagtgccaaagcggagatctgttcacctgggggccatggaggggggacccactaaagatcaagatcaaagattctccccatctcacagacaaggaaactgaggccagagggaggagagaattgctcatggctccagaactggtggcaagtttctctggactcttaggtttatttttaatatgaaatataaaaacagtttcaaatatcttattgagggagaagtaaaaacttatttaaacaaaaaaaaaaaaaaaaaaaaaaaa

SEQ ID NO: 121 - DNA, 1759 bp, Homo sapiens
aagttcaagggcgagagtgagtaccagcagaaggctgggagtctgtagtttgttcctgctgccaggctccactgaggggaacggggacctgtctgaagagaagatgcccctgctgacactctacctgctcctcttctggctctcaggctactccattgtcactcaaatcaccggtccaacaacagtgaatggcttggagcggggctccttgaccgtgcagtgtgtttacagatcaggctgggagacctacttgaagtggtggtgtcgaggagctatttggcgtgactgcaagatccttgttaaaaccagtgggtcagagcaggaggtgaagagggaccgggtgtccatcaaggacaatcagaaaaaccgcacgttcactgtgaccatggaggatctcatgaaaactgatgctgacacttactggtgtggaattgagaaaactggaaatgaccttggggtcacagttcaagtgaccattgacccagcaccagtcacccaagaagaaactagcagctccccaactctgaccggccaccacttggacaacaggcacaagctcctgaagctcagtgtcctcctgcccctcatcttcaccatattgctgctgcttttggtggccgcctcactcttggcttggaggatgatgaagtaccagcagaaagcagccgggatgtccccagagcaggtactgcagcccctggagggcgacctctgctatgcagacctgaccctgcagctggccggaacctccccgcaaaaggctaccacgaagctttcctctgcccaggttgaccaggtggaagtggaatatgtcaccatggcttccttgccgaaggaggacatttcctatgcatctctgaccttgggtgctgaggatcaggaaccgacctactgcaacatgggccacctcagtagccacctccccggcaggggccctgaggagcccacggaatacagcaccatcagcaggccttagcctgcactccaggctccttcttggaccccaggctgtgagcacactcctgcctcatcgaccgtctgccccctgctcccctcatcaggaccaacccggggactggtgcctctgcctgatcagccagcattgcccctagctctgggttgggcttggggccaagtctcagggggcttctaggagttggggttttctaaacgtcccctcctctcctacatagttgaggagggggctagggatatgctctggggctttcatgggaatgatgaagatgataatgagaaaaatgttatcattattatcatgaagtaccattatcgtaatacaatgaacctttatttattgcctaccacatgttatgggctgaataatggcccccaaagatatctgtgtcctaatcctcagaacctgtgactgttaccttctgtggcagaaagggacagtgcagatgtatgtaagttaaggactttgagatagagaggttattcttgctgattcaggtgggcccaaaatatcaccacaagggtcctcataagaaagaggccagaaggtcaaagaggtagagacaaagtgatgatggaagtggacgtgggtgtgacgtgagcaggggccatgaatgccgcagccttcagatgccagaaagggaaaggaatggattcccctgcctggagcctccaaaagaaaccagccctgcccacgccttgacttgagcccattgaaactgatcttgagctcctggcctccagaattgcaggagaataaatttgtgttgtttttaatgagcca

SEQ ID NO: 122 - DNA, 1494 bp, Homo sapiens
agtgaaacagaaggggaggtgcagtttcagaacccagccagcctctctcttgctgcctagcctcctgccggcctcatcttcgcccagccaaccccgcctggagccctatggccaactgcgagttcagcccggtgtccggggacaaaccctgctgccggctctctaggagagcccaactctgtcttggcgtcagtatcctggtcctgatcctcgtcgtggtgctcgcggtggtcgtcccgaggtggcgccagcagtggagcggtccgggcaccaccaagcgctttcccgagaccgtcctggcgcgatgcgtcaagtacactgaaattcatcctgagatgagacatgtagactgccaaagtgtatgggatgctttcaagggtgcatttatttcaaaacatccttgcaacattactgaagaagactatcagccactaatgaagttgggaactcagaccgtaccttgcaacaagattcttctttggagcagaataaaagatctggcccatcagttcacacaggtccagcgggacatgttcaccctggaggacacgctgctaggctaccttgctgatgacctcacatggtgtggtgaattcaacacttccaaaataaactatcaatcttgcccagactggagaaaggactgcagcaacaaccctgtttcagtattctggaaaacggtttcccgcaggtttgcagaagctgcctgtgatgtggtccatgtgatgctcaatggatcccgcagtaaaatctttgacaaaaacagcacttttgggagtgtggaagtccataatttgcaaccagagaaggttcagacactagaggcctgggtgatacatggtggaagagaagattccagagacttatgccaggatcccaccataaaagagctggaatcgattataagcaaaaggaatattcaattttcctgcaagaatatctacagacctgacaagtttcttcagtgtgtgaaaaatcctgaggattcatcttgcacatctgagatctgagccagtcgctgtggttgttttagctccttgactccttgtggtttatgtcatcatacatgactcagcatacctgctggtgcagagctgaagattttggagggtcctccacaataaggtcaatgccagagacggaagcctttttccccaaagtcttaaaataacttatatcatcagcatacctttattgtgatctatcaatagtcaagaaaaattattgtataagattagaatgaaaattgtatgttaagttacttcactttaattctcatgtgatccttttatgttatttatatattggtaacatcctttctattgaaaaatcaccacaccaaacctctcttattagaacaggcaagtgaagaaaagtgaatgctcaagtttttcagaaagcattacatttccaaatgaatgaccttgttgcatgatgtatttttgtacccttcctacagatagtcaaaccataaacttcatggtcatgggtaaa

SEQ ID NO: 123 - DNA, 1327 bp, Homo sapiens
cagggtcccagatgcacaggaggagaagcaggagctgtcgggaagatcagaagccagtcatggatgaccagcgcgaccttatctccaacaatgagcaactgcccatgctgggccggcgccctggggccccggagagcaagtgcagccgcggagccctgtacacaggcttttccatcctggtgactctgctcctcgctggccaggccaccaccgcctacttcctgtaccagcagcagggccggctggacaaactgacagtcacctcccagaacctgcagctggagaacctgcgcatgaagcttcccaagcctcccaagcctgtgagcaagatgcgcatggccaccccgctgctgatgcaggcgctgcccatgggagccctgccccaggggcccatgcagaatgccaccaagtatggcaacatgacagaggaccatgtgatgcacctgctccagaatgctgaccccctgaaggtgtacccgccactgaaggggagcttcccggagaacctgagacaccttaagaacaccatggagaccatagactggaaggtctttgagagctggatgcaccattggctcctgtttgaaatgagcaggcactccttggagcaaaagcccactgacgctccaccgaaagagtcactggaactggaggacccgtcttctgggctgggtgtgaccaagcaggatctgggcccagtccccatgtgagagcagcagaggcggtcttcaacatcctgccagccccacacagctacagctttcttgctcccttcagcccccagcccctcccccatctcccaccctgtacctcatcccatgagaccctggtgcctggctctttcgtcacccttggacaagacaaaccaagtcggaacagcagataacaatgcagcaaggccctgctgcccaatctccatctgtcaacaggggcgtgaggtcccaggaagtggccaaaagctagacagatccccgttcctgacatcacagcagcctccaacacaaggctccaagacctaggctcatggacgagatgggaaggcacagggagaagggataaccctacacccagaccccaggctggacatgctgactgtcctctcccctccagcctttggccttggcttttctagcctatttacctgcaggctgagccactctcttccctttccccagcatcactccccaaggaagagccaatgttttccacccataatcctttctgccgacccctagttccctctgctcagccaagcttgttatcagctttcagggccatggttcacattagaataaaaggtagtaattagaaaaaaaaaaaaaaaaaa

SEQ ID NO: 124 - DNA, 1155 bp, Homo sapiens
ccggggggtcagggtcccagatgcacaggaggagaagcaggagctgtcgggaagatcagaagccagtcatggatgaccagcgcgaccttatctccaacaatgagcaactgcccatgctgggccggcgccctggggccccggagagcaagtgcagccgcggagccctgtacacaggcttttccatcctggtgactctgctcctcgctggccaggccaccaccgcctacttcctgtaccagcagcagggccggctggacaaactgacagtcacctcccagaacctgcagctggagaacctgcgcatgaagcttcccaagcctcccaagcctgtgagcaagatgcgcatggccaccccgctgctgatgcaggcgctgcccatgggagccctgccccaggggcccatgcagaatgccaccaagtatggcaacatgacagaggaccatgtgatgcacctgctccagagtcactggaactggaggacccgtcttctgggctgggtgtgaccaagcaggatctgggcccagtccccatgtgagagcagcagaggcggtcttcaacatcctgccagccccacacagctacagctttcttgctcccttcagcccccagcccctcccccatctcccaccctgtacctcatcccatgagaccctggtgcctggctctttcgtcacccttggacaagacaaaccaagtcggaacagcagataacaatgcagcaaggccctgctgcccaatctccatctgtcaacaggggcgtgaggtcccaggaagtggccaaaagctagacagatccccgttcctgacatcacagcagcctccaacacaaggctccaagacctaggctcatggacgagatgggaaggcacagggagaagggataaccctacacccagaccccaggctggacatgctgactgtcctctcccctccagcctttggccttggcttttctagcctatttacctgcaggctgagccactctcttccctttccccagcatcactccccaaggaagagccaatgttttccacccataatcctttctgccgacccctagttccctctgctcagccaagcttgttatcagctttcagggccatggttcacattagaataaaaggtagtaattagaacaaaaaaaaaaaaaaaaaa

SEQ ID NO: 125 - DNA, 1519 bp, Homo sapiens
cagggtcccagatgcacaggaggagaagcaggagctgtcgggaagatcagaagccagtcatggatgaccagcgcgaccttatctccaacaatgagcaactgcccatgctgggccggcgccctggggccccggagagcaagtgcagccgcggagccctgtacacaggcttttccatcctggtgactctgctcctcgctggccaggccaccaccgcctacttcctgtaccagcagcagggccggctggacaaactgacagtcacctcccagaacctgcagctggagaacctgcgcatgaagcttcccaagcctcccaagcctgtgagcaagatgcgcatggccaccccgctgctgatgcaggcgctgcccatgggagccctgccccaggggcccatgcagaatgccaccaagtatggcaacatgacagaggaccatgtgatgcacctgctccagaatgctgaccccctgaaggtgtacccgccactgaaggggagcttcccggagaacctgagacaccttaagaacaccatggagaccatagactggaaggtctttgagagctggatgcaccattggctcctgtttgaaatgagcaggcactccttggagcaaaagcccactgacgctccaccgaaagtactgaccaagtgccaggaagaggtcagccacatccctgctgtccacccgggttcattcaggcccaagtgcgacgagaacggcaactatctgccactccagtgctatgggagcatcggctactgctggtgtgtcttccccaacggcacggaggtccccaacaccagaagccgcgggcaccataactgcagtgagtcactggaactggaggacccgtcttctgggctgggtgtgaccaagcaggatctgggcccagtccccatgtgagagcagcagaggcggtcttcaacatcctgccagccccacacagctacagctttcttgctcccttcagcccccagcccctcccccatctcccaccctgtacctcatcccatgagaccctggtgcctggctctttcgtcacccttggacaagacaaaccaagtcggaacagcagataacaatgcagcaaggccctgctgcccaatctccatctgtcaacaggggcgtgaggtcccaggaagtggccaaaagctagacagatccccgttcctgacatcacagcagcctccaacacaaggctccaagacctaggctcatggacgagatgggaaggcacagggagaagggataaccctacacccagaccccaggctggacatgctgactgtcctctcccctccagcctttggccttggcttttctagcctatttacctgcaggctgagccactctcttccctttccccagcatcactccccaaggaagagccaatgttttccacccataatcctttctgccgacccctagttccctctgctcagccaagcttgttatcagctttcagggccatggttcacattagaataaaaggtagtaattagaaaaaaaaaaaaaaaaaa

SEQ ID NO: 126 - DNA, 1497 bp, Homo sapiens
gagcgagcgcgcaacggcggcgacggcggcgaccccaccgcgcatcctgccaggcctccggcgcccagcgccccacgcgcccccgcgcccccgcgcccccgcgcccctttcttcgcgcccccgcccctcggcccgccaggcccccttgccggccacccgccaggccccgcgccggcccgcccgccgcccaggaccggcccgcgccccgcaggccgcccgccgcccgcgccgccatgggagtggagggctgcaccaagtgcatcaagtacctgctcttcgtcttcaatttcgtcttctggctggctggaggcgtgatcctgggtgtggccctgtggctccgccatgacccgcagaccaccaacctcctgtatctggagctgggagacaagcccgcgcccaacaccttctatgtaggcatctacatcctcatcgctgtgggcgctgtcatgatgttcgttggcttcctgggctgctacggggccatccaggaatcccagtgcctgctggggacgttcttcacctgcctggtcatcctgtttgcctgtgaggtggccgccggcatctggggctttgtcaacaaggaccagatcgccaaggatgtgaagcagttctatgaccaggccctacagcaggccgtggtggatgatgacgccaacaacgccaaggctgtggtgaagaccttccacgagacgcttgactgctgtggctccagcacactgactgctttgaccacctcagtgctcaagaacaatttgtgtccctcgggcagcaacatcatcagcaacctcttcaaggaggactgccaccagaagatcgatgacctcttctccgggaagctgtacctcatcggcattgctgccatcgtggtcgctgtgatcatgatcttcgagatgatcctgagcatggtgctgtgctgtggcatccggaacagctccgtgtactgaggccccgcagctctggccacagggacctctgcagtgccccctaagtgacccggacacttccgagggggccatcaccgcctgtgtatataacgtttccggtattactctgctacacgtagcctttttacttttggggttttgtttttgttctgaactttcctgttaccttttcagggctgacgtcacatgtaggtggcgtgtatgagtggagacgggcctgggtcttggggactggagggcaggggtccttctgccctggggtcccagggtgctctgcctgctcagccaggcctctcctgggagccactcgcccagagactcagcttggccaacttggggggctgtgtccacccagcccgcccgtcctgtgggctgcacagctcaccttgttccctcctgccccggttcgagagccgagtctgtgggcactctctgccttcatgcacctgtcctttctaacacgtcgccttcaactgtaatcacaacatcctgactccgtcatttaataaagaaggaacatcaggcatgctaccaggcctgtgcagtccctcag

SEQ ID NO: 127 - DNA, 2784 bp, Homo sapiens
ggaaggcttgcacagggtgaaagctttgcttctctgctgctgtaacagggactagcacagacacacggatgagtggggtcatttccagatattaggtcacagcagaagcagccaaaatggatccccagtgcactatgggactgagtaacattctctttgtgatggccttcctgctctctggtgctgctcctctgaagattcaagcttatttcaatgagactgcagacctgccatgccaatttgcaaactctcaaaaccaaagcctgagtgagctagtagtattttggcaggaccaggaaaacttggttctgaatgaggtatacttaggcaaagagaaatttgacagtgttcattccaagtatatgggccgcacaagttttgattcggacagttggaccctgagacttcacaatcttcagatcaaggacaagggcttgtatcaatgtatcatccatcacaaaaagcccacaggaatgattcgcatccaccagatgaattctgaactgtcagtgcttgctaacttcagtcaacctgaaatagtaccaatttctaatataacagaaaatgtgtacataaatttgacctgctcatctatacacggttacccagaacctaagaagatgagtgttttgctaagaaccaagaattcaactatcgagtatgatggtgttatgcagaaatctcaagataatgtcacagaactgtacgacgtttccatcagcttgtctgtttcattccctgatgttacgagcaatatgaccatcttctgtattctggaaactgacaagacgcggcttttatcttcacctttctctatagagcttgaggaccctcagcctcccccagaccacattccttggattacagctgtacttccaacagttattatatgtgtgatggttttctgtctaattctatggaaatggaagaagaagaagcggcctcgcaactcttataaatgtggaaccaacacaatggagagggaagagagtgaacagaccaagaaaagagaaaaaatccatatacctgaaagatctgatgaagcccagcgtgtttttaaaagttcgaagacatcttcatgcgacaaaagtgatacatgtttttaattaaagagtaaagcccatacaagtattcattttttctaccctttcctttgtaagttcctgggcaacctttttgatttcttccagaaggcaaaaagacattaccatgagtaataagggggctccaggactccctctaagtggaatagcctccctgtaactccagctctgctccgtatgccaagaggagactttaattctcttactgcttcttttcacttcagagcacacttatgggccaagcccagcttaatggctcatgacctggaaataaaatttaggaccaatacctcctccagatcagattcttctcttaatttcatagattgtgttttttttttaaatagacctctcaatttctggaaaactgccttttatctgcccagaattctaagctggtgccccactgaattttgtgtgtacctgtgactaaacaactacctcctcagtctgggtgggacttatgtatttatgaccttatagtgttaatatcttgaaacatagagatctatgtactgtaatagtgtgattactatgctctagagaaaagtctacccctgctaaggagttctcatccctctgtcagggtcagtaaggaaaacggtggcctagggtacaggcaacaatgagcagaccaacctaaatttggggaaattaggagaggcagagatagaacctggagccacttctatctgggctgttgctaatattgaggaggcttgccccacccaacaagccatagtggagagaactgaataaacaggaaaatgccagagcttgtgaaccctgtttctcttgaagaactgactagtgagatggcctggggaagctgtgaaagaaccaaaagagatcacaatactcaaaagagagagagagagaaaaaagagagatcttgatccacagaaatacatgaaatgtctggtctgtccaccccatcaacaagtcttgaaacaagcaacagatggatagtctgtccaaatggacataagacagacagcagtttccctggtggtcagggaggggttttggtgatacccaagttattgggatgtcatcttcctggaagcagagctggggagggagagccatcaccttgataatgggatgaatggaaggaggcttaggactttccactcctggctgagagaggaagagctgcaacggaattaggaagaccaagacacagatcacccggggcttacttagcctacagatgtcctacgggaacgtgggctggcccagcatagggctagcaaatttgagttggatgattgtttttgctcaaggcaaccagaggaaacttgcatacagagacagatatactgggagaaatgactttgaaaacctggctctaaggtgggatcactaagggatggggcagtctctgcccaaacataaagagaactctggggagcctgagccacaaaaatgttcctttattttatgtaaaccctcaagggttatagactgccatgctagacaagcttgtccatgtaatattcccatgtttttaccctgcccctgccttgattagactcctagcacctggctagtttctaacatgttttgtgcagcacagtttttaataaatgcttgttacattcaaaaaaaaaaaaaaaaaaaaaaaaaaaaaaaaaaaaaaaaaaaaaaaaaaaaaaaaaaaaaaaaaaaaaaaaaaaaa

SEQ ID NO: 128 - DNA, 2797 bp, Homo sapiens
aggagccttaggaggtacggggagctcgcaaatactccttttggtttattcttaccaccttgcttctgtgttccttgggaatgctgctgtgcttatgcatctggtctctttttggagctacagtggacaggcatttgtgacagcactatgggactgagtaacattctctttgtgatggccttcctgctctctggtgctgctcctctgaagattcaagcttatttcaatgagactgcagacctgccatgccaatttgcaaactctcaaaaccaaagcctgagtgagctagtagtattttggcaggaccaggaaaacttggttctgaatgaggtatacttaggcaaagagaaatttgacagtgttcattccaagtatatgggccgcacaagttttgattcggacagttggaccctgagacttcacaatcttcagatcaaggacaagggcttgtatcaatgtatcatccatcacaaaaagcccacaggaatgattcgcatccaccagatgaattctgaactgtcagtgcttgctaacttcagtcaacctgaaatagtaccaatttctaatataacagaaaatgtgtacataaatttgacctgctcatctatacacggttacccagaacctaagaagatgagtgttttgctaagaaccaagaattcaactatcgagtatgatggtgttatgcagaaatctcaagataatgtcacagaactgtacgacgtttccatcagcttgtctgtttcattccctgatgttacgagcaatatgaccatcttctgtattctggaaactgacaagacgcggcttttatcttcacctttctctatagagcttgaggaccctcagcctcccccagaccacattccttggattacagctgtacttccaacagttattatatgtgtgatggttttctgtctaattctatggaaatggaagaagaagaagcggcctcgcaactcttataaatgtggaaccaacacaatggagagggaagagagtgaacagaccaagaaaagagaaaaaatccatatacctgaaagatctgatgaagcccagcgtgtttttaaaagttcgaagacatcttcatgcgacaaaagtgatacatgtttttaattaaagagtaaagcccatacaagtattcattttttctaccctttcctttgtaagttcctgggcaacctttttgatttcttccagaaggcaaaaagacattaccatgagtaataagggggctccaggactccctctaagtggaatagcctccctgtaactccagctctgctccgtatgccaagaggagactttaattctcttactgcttcttttcacttcagagcacacttatgggccaagcccagcttaatggctcatgacctggaaataaaatttaggaccaatacctcctccagatcagattcttctcttaatttcatagattgtgttttttttttaaatagacctctcaatttctggaaaactgccttttatctgcccagaattctaagctggtgccccactgaattttgtgtgtacctgtgactaaacaactacctcctcagtctgggtgggacttatgtatttatgaccttatagtgttaatatcttgaaacatagagatctatgtactgtaatagtgtgattactatgctctagagaaaagtctacccctgctaaggagttctcatccctctgtcagggtcagtaaggaaaacggtggcctagggtacaggcaacaatgagcagaccaacctaaatttggggaaattaggagaggcagagatagaacctggagccacttctatctgggctgttgctaatattgaggaggcttgccccacccaacaagccatagtggagagaactgaataaacaggaaaatgccagagcttgtgaaccctgtttctcttgaagaactgactagtgagatggcctggggaagctgtgaaagaaccaaaagagatcacaatactcaaaagagagagagagagaaaaaagagagatcttgatccacagaaatacatgaaatgtctggtctgtccaccccatcaacaagtcttgaaacaagcaacagatggatagtctgtccaaatggacataagacagacagcagtttccctggtggtcagggaggggttttggtgatacccaagttattgggatgtcatcttcctggaagcagagctggggagggagagccatcaccttgataatgggatgaatggaaggaggcttaggactttccactcctggctgagagaggaagagctgcaacggaattaggaagaccaagacacagatcacccggggcttacttagcctacagatgtcctacgggaacgtgggctggcccagcatagggctagcaaatttgagttggatgattgtttttgctcaaggcaaccagaggaaacttgcatacagagacagatatactgggagaaatgactttgaaaacctggctctaaggtgggatcactaagggatggggcagtctctgcccaaacataaagagaactctggggagcctgagccacaaaaatgttcctttattttatgtaaaccctcaagggttatagactgccatgctagacaagcttgtccatgtaatattcccatgtttttaccctgcccctgccttgattagactcctagcacctggctagtttctaacatgttttgtgcagcacagtttttaataaatgcttgttacattcaaaaaaaaaaaaaaaaaaaaaaaaaaaaaaaaaaaaaaaaaaaaaaaaaaaaaaaaaaaaaaaaaaaaaaaaaaaaa

SEQ ID NO: 129 - DNA, 3654 bp, Homo sapiens
agatgccgcgggggccgctcgcagccgccgctgacttgtgaatgggaccgggactggggccgggactgacaccgcagcgcttgccctgcgccagggactggcggctcggaggttgcgtccaccctcaagggccccagaaatcactgtgttttcagctcagcggccctgtgacattccttcgtgttgtcatttgttgagtgaccaatcagatgggtggagtgtgttacagaaattggcagcaagtatccaatgggtgaagaagaagctaactggggacgtgggcagccctgacgtgatgagctcaaccagcagagacattccatcccaagagaggtctgcgtgacgcgtccgggaggccaccctcagcaagaccaccgtacagttggtggaaggggtgacagctgcattctcctgtgcctaccacgtaaccaaaaatgaaggagaactactgtttacaagccgccctggtgtgcctgggcatgctgtgccacagccatgcctttgccccagagcggcgggggcacctgcggccctccttccatgggcaccatgagaagggcaaggaggggcaggtgctacagcgctccaagcgtggctgggtctggaaccagttcttcgtgatagaggagtacaccgggcctgaccccgtgcttgtgggcaggcttcattcagatattgactctggtgatgggaacattaaatacattctctcaggggaaggagctggaaccatttttgtgattgatgacaaatcagggaacattcatgccaccaagacgttggatcgagaagagagagcccagtacacgttgatggctcaggcggtggacagggacaccaatcggccactggagccaccgtcggaattcattgtcaaggtccaggacattaatgacaaccctccggagttcctgcacgagacctatcatgccaacgtgcctgagaggtccaatgtgggaacgtcagtaatccaggtgacagcttcagatgcagatgaccccacttatggaaatagcgccaagttagtgtacagtatcctcgaaggacaaccctatttttcggtggaagcacagacaggtatcatcagaacagccctacccaacatggacagggaggccaaggaggagtaccacgtggtgatccaggccaaggacatgggtggacatatgggcggactctcagggacaaccaaagtgacgatcacactgaccgatgtcaatgacaacccaccaaagtttccgcagagcgtataccagatgtctgtgtcagaagcagccgtccctggggaggaagtaggaagagtgaaagctaaagatccagacattggagaaaatggcttagtcacatacaatattgttgatggagatggtatggaatcgtttgaaatcacaacggactatgaaacacaggagggggtgataaagctgaaaaagcctgtagattttgaaaccaaaagagcctatagcttgaaggtagaggcagccaacgtgcacatcgacccgaagtttatcagcaatggccctttcaaggacactgtgaccgtcaagatctcagtagaagatgctgatgagccccctatgttcttggccccaagttacatccacgaagtccaagaaaatgcagctgctggcaccgtggttgggagagtgcatgccaaagaccctgatgctgccaacagcccgataaggtattccatcgatcgtcacactgacctcgacagatttttcactattaatccagaggatggttttattaaaactacaaaacctctggatagagaggaaacagcctggctcaacatcactgtctttgcagcagaaatccacaatcggcatcaggaagccaaagtcccagtggccattagggtccttgatgtcaacgataatgctcccaagtttgctgccccttatgaaggtttcatctgtgagagtgatcagaccaagccactttccaaccagccaattgttacaattagtgcagatgacaaggatgacacggccaatggaccaagatttatcttcagcctaccccctgaaatcattcacaatccaaatttcacagtcagagacaaccgagataacacagcaggcgtgtacgcccggcgtggagggttcagtcggcagaagcaggacttgtaccttctgcccatagtgatcagcgatggcggcatcccgcccatgagtagcaccaacaccctcaccatcaaagtctgcgggtgcgacgtgaacggggcactgctctcctgcaacgcagaggcctacattctgaacgccggcctgagcacaggcgccctgatcgccatcctcgcctgcatcgtcattctcctggtcattgtagtattgtttgtgaccctgagaaggcaaaagaaagaaccactcattgtctttgaggaagaagatgtccgtgagaacatcattacttatgatgatgaagggggtggggaagaagacacagaagcctttgatattgccaccctccagaatcctgatggtatcaatggatttatcccccgcaaagacatcaaacctgagtatcagtacatgcctagacctgggctccggccagcgcccaacagcgtggatgtcgatgacttcatcaacacgagaatacaggaggcagacaatgaccccacggctcctccttatgactccattcaaatctacggttatgaaggcaggggctcagtggccgggtccctgagctccctagagtcggccaccacagattcagacttggactatgattatctacagaactggggacctcgttttaagaaactagcagatttgtatggttccaaagacacttttgatgacgattcttaacaataacgatacaaatttggccttaagaactgtgtctggcgttctcaagaatctagaagatgtgtaaacaggtatttttttaaatcaaggaaaggctcatttaaaacaggcaaagttttacagagaggatacatttaataaaactgcgaggacatcaaagtggtaaatactgtgaaataccttttctcacaaaaaggcaaatattgaagttgtttatcaacttcgctagaaaaaaaaaacacttggcatacaaaatatttaagtgaaggagaagtctaacgctgaactgacaatgaagggaaattgtttatgtgttatgaacatccaagtctttcttcttttttaagttgtcaaagaagcttccacaaaattagaaaggacaacagttctgagctgtaatttcgccttaaactctggacactctatatgtagtgcatttttaaacttgaaatatataatattcagccagcttaaacccatacaatgtatgtacaatacaatgtacaattatgtctcttgagcatcaatcttgttactgctgattcttgtaaatctttttgcttctactttcatcttaaactaatacgtgccagatataactgtcttgtttcagtgagagacgccctatttctatgtcatttttaatgtatctatttgtacaattttaaagttcttattttagtatacgtataaatatcagtattctgacatgtaagaaaatgttacggcatcacacttatattttatgaacattgtactgttgctttaatatgagcttcaatataagaagcaatctttgaaataaaaaaagatttttttttaaaaaaaa

SEQ ID NO: 130 - DNA, 3842 bp, Homo sapiens
gggaagttggctggctggcgaggcagagcctctcctcaaagcctggctcccacggaaaatatgctcagtgcagccgcgtgcatgaatgaaaacgccgccgggcgcttctagtcggacaaaatgcagccgagaactccgctcgttctgtgcgttctcctgtcccaggtgctgctgctaacatctgcagaagatttggactgcactcctggatttcagcagaaagtgttccatatcaatcagccagctgaattcattgaggaccagtcaattctaaacttgaccttcagtgactgtaagggaaacgacaagctacgctatgaggtctcgagcccatacttcaaggtgaacagcgatggcggcttagttgctctgagaaacataactgcagtgggcaaaactctgttcgtccatgcacggaccccccatgcggaagatatggcagaactcgtgattgtcggggggaaagacatccagggctccttgcaggatatatttaaatttgcaagaacttctcctgtcccaagacaaaagaggtccattgtggtatctcccattttaattccagagaatcagagacagcctttcccaagagatgttggcaaggtagtcgatagtgacaggccagaaaggtccaagttccggctcactggaaagggagtggatcaagagcctaaaggaattttcagaatcaatgagaacacagggagcgtctccgtgacacggaccttggacagagaagtaatcgctgtttatcaactatttgtggagaccactgatgtcaatggcaaaactctcgaggggccggtgcctctggaagtcattgtgattgatcagaatgacaaccgaccgatctttcgggaaggcccctacatcggccacgtcatggaagggtcacccacaggcaccacagtgatgcggatgacagcctttgatgcagatgacccagccaccgataatgccctcctgcggtataatatccgtcagcagacgcctgacaagccatctcccaacatgttctacatcgatcctgagaaaggagacattgtcactgttgtgtcacctgcgctgctggaccgagagactctggaaaatcccaagtatgaactgatcatcgaggctcaagatatggctggactggatgttggattaacaggcacggccacagccacgatcatgatcgatgacaaaaatgatcactcaccaaaattcaccaagaaagagtttcaagccacagtcgaggaaggagctgtgggagttattgtcaatttgacagttgaagataaggatgaccccaccacaggtgcatggagggctgcctacaccatcatcaacggaaaccccgggcagagctttgaaatccacaccaaccctcaaaccaacgaagggatgctttctgttgtcaaaccattggactatgaaatttctgccttccacaccctgctgatcaaagtggaaaatgaagacccactcgtacccgacgtctcctacggccccagctccacagccaccgtccacatcactgtcctggatgtcaacgagggcccagtcttctacccagaccccatgatggtgaccaggcaggaggacctctctgtgggcagcgtgctgctgacagtgaatgccacggaccccgactccctgcagcatcaaaccatcaggtattctgtttacaaggacccagcaggttggctgaatattaaccccatcaatgggactgttgacaccacagctgtgctggaccgtgagtccccatttgtcgacaacagcgtgtacactgctctcttcctggcaattgacagtggcaaccctcccgctacgggcactgggactttgctgataaccctggaggacgtgaatgacaatgccccgttcatttaccccacagtagctgaagtctgtgatgatgccaaaaacctcagtgtagtcattttgggagcatcagataaggatcttcacccgaatacagatcctttcaaatttgaaatccacaaacaagctgttcctgataaagtctggaagatctccaagatcaacaatacacacgccctggtaagccttcttcaaaatctgaacaaagcaaactacaacctgcccatcatggtgacagattcagggaaaccacccatgacgaatatcacagatctcagggtacaagtgtgctcctgcaggaattccaaagtggactgcaacgcggcaggggccctgcgcttcagcctgccctcagtcctgctcctcagcctcttcagcttagcttgtctgtgagaactcctgacgtctgaagcttgactcccaagtttccatagcaacaggaaaaaaaaaaatctatccaaatctgaagattgcggtttacagctatcgaacttcacaactaggcctcaattgttccggttttttattttctttacaatttcacttagtctgtacttcatcattttgacagcatcttcctccctcctttaattaatggaatcttctgaattttccctgaatgtttaaagatcatgacatatgacttgatcttctgggagcaggaacaatgactactttttctggtgtgttaacatgtcgctagccagtgctccaggcacccagctttgtctgtgggttagtattggtgtatgtatgagtatctgtatgtatatatacacggtatttatagagagagactatcctggagaagcctcgttttgatgccattcttccttgcaaggttaagcaaggtgggtggaaactaagacacctgaaccctccagggcctcccgcatcaaggtcagcatgaggacagaccacagagctgtcacttttgctccgaagctacttctccactgtcccgttcagtctgaatgctgccacaaccagccaggcaggtccacagagagggagagcagagaaagaagtcctttctctttattgagttcgaggactacaaccaatttacactgccatctgatgccgtgatcctgagccaaggaggtgaggagcagagcaggcaatttcaccaccaaatgccaagaaaagggctgacattttctttcatgggcaccaacctgcatttgtatgtgtcccgaatccacagtcgtactgattctaatggggacacagatcatggtagagaatctctccctcctcagtaaatgtacaactgcacctgtcatcatggaggtcatacatgcatacaaagaggtgtacaggtaccatcttgtatacacatatatacccacatgtacagacatacatttatgcacattcacgctgtttgtttcatatatacaggcataaaatagagtaaatacaggtagttttaaaagtacccttttgtgtgaattgactaccgttgtttgcaaacccgaaaataaaagacgttcattatgtatgaaaagtaactgatttgtattctgtgagcatgtaaaagcggaaagttagtgcttgttctaagattaccttcttgttgataaaccataaatgaatcatcaaagctcacaccaaatttttctatcaaataaaactagtgacagcttgtggctttttattagagctcgccacgaactagggtaaggtgagtgtcttagcatattttaatgcagttgcttactaaaggttttaaccgcacatgcacacacacacgctttcttatgcaatctatgtttgcacttgtgctttcagttagccttctgtaggaagtagaagtcatatgttgtctttgttgtagtgaaattatacagatagagttccatatattgtatttgtttcaatggtaaatccttttggaacatatagaatgcagagatttttttttccattaaaataaatgggtattggtggttaaaaaaaaaaaaaaaaaa

SEQ ID NO: 131 - DNA, 3947 bp, Homo sapiens
ttgggaaacccctacctgtctgtacctgtaggtcttttctctggggtctggaagaagaatccttcaatatcttgccttctggtaatctgagagcagggcgagaaaaggaagatcagagttccacccttaaatctgtaggttttcactcccccactctcctttgcagtcccgtggagtctccatctgagccctttcctagtccaggcatcccgatgttggtggatggcccatctgagcggccagccctgtgcttcttgctgttggctgtggcaatgtctttcttcggctcagctctatccatagatgaaacacgggcgcatctgttgttgaaagaaaagatgatgcggctgggggggcggctggtgctgaataccaaggaggagctggccaatgagaggctcatgacgctcaaaatcgctgagatgaaggaggccatgaggaccctgatattcccacccagcatgcactttttccaggccaagcatctcattgagagaagtcaagtgtttaatattctaaggatgatgccaaaaggggctgccttgcacctccatgacattggcatcgtgactatggactggctggtgaggaatgtcacctacaggcctcactgccacatctgtttcaccccaagggggatcatgcagttcagatttgctcacccaactccccgtccatcagaaaaatgttccaagtggattctgctggaggattatcggaagcgggtgcagaacgtcactgagtttgatgacagcttgctgaggaatttcactctggtgacccagcacccggaggtgatttacacaaaccaaaatgttgtctggtcgaaatttgaaaccatcttcttcaccatctctggtctcatccattacgcaccagtgttcagagactatgtcttccggagcatgcaggagttctacgaggacaacgtgctctacatggagatcagagccaggctgctgccggtgtatgagctcagtggagagcaccatgacgaagagtggtcagtgaagacttaccaggaagtagctcagaagtttgtggaaactcaccctgagtttattggaatcaaaatcatttattcggatcacagatccaaagatgtggctgtcatcgcagaatccatccgaatggccatggggctccgaatcaagttccccacggtggtggcagggtttgacctggtggggcatgaggacactggccactccttgcatgactacaaggaagctctgatgatccccgccaaggatggcgttaagctgccttacttcttccacgccggagaaacagactggcagggtacttccatagacaggaacattctggatgctctgatgctgaacactaccagaatcggccatggatttgctttgagcaaacaccccgcagtcaggacttactcctggaaaaaggacatccccatagaagtctgtcccatctctaaccaggtgctgaaactggtgtctgacttgaggaaccaccctgtagccactctgatggccactgggcaccccatggtgatcagctctgatgacccagctatgtttggtgccaaaggcttgtcctatgatttctatgaggtcttcatgggcattggggggatgaaggctgacctgaggaccctcaaacagctggccatgaactctatcaagtacagtaccctgttggagagtgagaaaaatactttcatggaaatctggaagaagagatgggataagttcatagcagatgtggctacaaagtgaggagaagctagccagccctctacaagctgtcttcttgcacacgctgtcacttcctctcactcgttcttgaatcagctccatgtgcccatgaaatcaatggcctctgtatggagcgaccctgtgagaagcacttggctggctgagcaaattcatcctctggaaatattctctctcagccacagtgacattgaccctcttggttttctcctgtctctggccatttcttccagtttccctatttcagagtcttctcctctctctgatctctgtgctgtttcctcaggactcagtcctgggctctcttctattctggtctctttatttttttatttttgtattttttcgagatggagttttgctcttgttgcccaggctggagtacaatggtgcgatctcagctcagtgcaacctccgccacccgggttcaggcaattctcttgcatcagcctcgcgagtagttggaattataggcatgtgccaccacacccagctgatttttgcatttttagtagagacaggttttcaccatgttggcgaggctggtatccaactcttgacctcaggtgatccactcgccccttggctcccaaagtgctggaattacaggcattagccaccatgcctggcctattctggtctctttaactctctcctctttatttctcttctctctctgtacacttttcctgggtggtctcatccattcctttgctttttcataccatttatttgttaatgattcccacatttatttatgcacttggagagctcacaggaatctcagaaactgatgaggtacaattctgaaccctcagtctcttccctttaaacctttctttttctctactttaatttttctaaagagtgtcttgctatgttgcccaggctggtctccaactcaagtgatcctcctgccgcagtctcccgaagtgctgggattactgacatgagccaccacactcagccctttaaacctttccctggcctttcccatagctggtgaaggacacctccatccattccacgcagttgctcaaagcagaaattttcagtgcaagtcttgatgctgcgccgtcccccactccctacatcagaacgcatccctcatctggactccagcggtggcttcttgatgctgcgcggtcccccactccctacatcagaatgcatcccgcatccagactccagcggtggtgctctacctgcacgctgttgccaagtccaagctaccatactcctgcctgagctatgacaacagcctcctcactgatctcccctttcttccctttgcctcctccagctcatttttcacagtgtagaatgacattttgtttgtttgttttgttttgtttgagatggagtctcgctctgttgcccagggtggagtgcagcggtgcgatctcggctcactgcaacctccacctcccgggttcaagcggattctcgtgcctcagcctcctgagtagctgggattacaggcatgcaccaccatgcccggataatttttgtatttttagtagagatggggtttcactatgttggccaggctggtctcgaacacctgacctcgtggtccacccgcctcggcctcccaaagcactgggattacaggcgtgagccacccggcctggcctagaatgacttttaaaagatcaaattaaatcaggtcactcctttgcttacaacgcagtgcgtttagaggtacaccccatgtctccacagggcatacagcatccgatttaatctggatccattccggcgccttcctctcccagtcacccagagggccccaaccccggcggccctttcttcctcaaatgtcctcggctctataccgtgcctgggtcttttctctttctctctgcctggaagattccttctttccccttttgtcttgcccactcctgtttacccttcaagtttcaagttcatgtcactgtctcagagaggttttcctgtgctcgccctgtttctctcaggaagccttgctcttttccatcatgcctctaatcacagcttataatcggatatttatttctgtgtctacagtcttgccctgccagactgtatgccccatgtgggcaggcgctcatgattgtttctgattgtttcacgcatgctgctaacccagagcctgggcccaaagctagttagtactcaataaacaatgcattgaatgcattgaaaaaaaaaaaaaaa

SEQ ID NO: 132 - DNA, 3070 bp, Homo sapiens
gtcctaatagccacgcccacctcaaatggcgatcccagagagcatctggcttcaattttcctttttccggaggggagatggattccctggaatggaactgggctctggtgtatgagctcagtggagagcaccatgacgaagagtggtcagtgaagacttaccaggaagtagctcagaagtttgtggaaactcaccctgagtttattggaatcaaaatcatttattcggatcacagatccaaagatgtggctgtcatcgcagaatccatccgaatggccatggggctccgaatcaagttccccacggtggtggcagggtttgacctggtggggcatgaggacactggccactccttgcatgactacaaggaagctctgatgatccccgccaaggatggcgttaagctgccttacttcttccacgccggagaaacagactggcagggtacttccatagacaggaacattctggatgctctgatgctgaacactaccagaatcggccatggatttgctttgagcaaacaccccgcagtcaggacttactcctggaaaaaggacatccccatagaagtctgtcccatctctaaccaggtgctgaaactggtgtctgacttgaggaaccaccctgtagccactctgatggccactgggcaccccatggtgatcagctctgatgacccagctatgtttggtgccaaaggcttgtcctatgatttctatgaggtcttcatgggcattggggggatgaaggctgacctgaggaccctcaaacagctggccatgaactctatcaagtacagtaccctgttggagagtgagaaaaatactttcatggaaatctggaagaagagatgggataagttcatagcagatgtggctacaaagtgaggagaagctagccagccctctacaagctgtcttcttgcacacgctgtcacttcctctcactcgttcttgaatcagctccatgtgcccatgaaatcaatggcctctgtatggagcgaccctgtgagaagcacttggctggctgagcaaattcatcctctggaaatattctctctcagccacagtgacattgaccctcttggttttctcctgtctctggccatttcttccagtttccctatttcagagtcttctcctctctctgatctctgtgctgtttcctcaggactcagtcctgggctctcttctattctggtctctttatttttttatttttgtattttttcgagatggagttttgctcttgttgcccaggctggagtacaatggtgcgatctcagctcagtgcaacctccgccacccgggttcaggcaattctcttgcatcagcctcgcgagtagttggaattataggcatgtgccaccacacccagctgatttttgcatttttagtagagacaggttttcaccatgttggcgaggctggtatccaactcttgacctcaggtgatccactcgccccttggctcccaaagtgctggaattacaggcattagccaccatgcctggcctattctggtctctttaactctctcctctttatttctcttctctctctgtacacttttcctgggtggtctcatccattcctttgctttttcataccatttatttgttaatgattcccacatttatttatgcacttggagagctcacaggaatctcagaaactgatgaggtacaattctgaaccctcagtctcttccctttaaacctttctttttctctactttaatttttctaaagagtgtcttgctatgttgcccaggctggtctccaactcaagtgatcctcctgccgcagtctcccgaagtgctgggattactgacatgagccaccacactcagccctttaaacctttccctggcctttcccatagctggtgaaggacacctccatccattccacgcagttgctcaaagcagaaattttcagtgcaagtcttgatgctgcgccgtcccccactccctacatcagaacgcatccctcatctggactccagcggtggcttcttgatgctgcgcggtcccccactccctacatcagaatgcatcccgcatccagactccagcggtggtgctctacctgcacgctgttgccaagtccaagctaccatactcctgcctgagctatgacaacagcctcctcactgatctcccctttcttccctttgcctcctccagctcatttttcacagtgtagaatgacattttgtttgtttgttttgttttgtttgagatggagtctcgctctgttgcccagggtggagtgcagcggtgcgatctcggctcactgcaacctccacctcccgggttcaagcggattctcgtgcctcagcctcctgagtagctgggattacaggcatgcaccaccatgcccggataatttttgtatttttagtagagatggggtttcactatgttggccaggctggtctcgaacacctgacctcgtggtccacccgcctcggcctcccaaagcactgggattacaggcgtgagccacccggcctggcctagaatgacttttaaaagatcaaattaaatcaggtcactcctttgcttacaacgcagtgcgtttagaggtacaccccatgtctccacagggcatacagcatccgatttaatctggatccattccggcgccttcctctcccagtcacccagagggccccaaccccggcggccctttcttcctcaaatgtcctcggctctataccgtgcctgggtcttttctctttctctctgcctggaagattccttctttccccttttgtcttgcccactcctgtttacccttcaagtttcaagttcatgtcactgtctcagagaggttttcctgtgctcgccctgtttctctcaggaagccttgctcttttccatcatgcctctaatcacagcttataatcggatatttatttctgtgtctacagtcttgccctgccagactgtatgccccatgtgggcaggcgctcatgattgtttctgattgtttcacgcatgctgctaacccagagcctgggcccaaagctagttagtactcaataaacaatgcattgaatga

SEQ ID NO: 133 - DNA, 2160 bp, Homo sapiens
ctttaatgggaaggccattttttggtttcagttacggtaaatctctctggatttcagccaaattctttcagagttcaaaagtacaaagctctttaggaggtttgttcttttgaaacattttttcagaggttaaaaattaaatttcaaaagaatacctggagtggaaaagagttctcagcagagacaaagaccccgaacacctccaacatgaagcttcttcatgttttcctgttatttctgtgcttccacttaaggttttgcaaggtcacttatacatctcaagaggatctggtggagaaaaagtgcttagcaaaaaaatatactcacctctcctgcgataaagtcttctgccagccatggcagagatgcattgagggcacctgtgtttgtaaactaccgtatcagtgcccaaagaatggcactgcagtgtgtgcaactaacaggagaagcttcccaacatactgtcaacaaaagagtttggaatgtcttcatccagggacaaagtttttaaataacggaacatgcacagccgaaggaaagtttagtgtttccttgaagcatggaaatacagattcagagggaatagttgaagtaaaacttgtggaccaagataagacaatgttcatatgcaaaagcagctggagcatgagggaagccaacgtggcctgccttgaccttgggtttcaacaaggtgctgatactcaaagaaggtttaagttgtctgatctctctataaattccactgaatgtctacatgtgcattgccgaggattagagaccagtttggctgaatgtacttttactaagagaagaactatgggttaccaggatttcgctgatgtggtttgttatacacagaaagcagattctccaatggatgacttctttcagtgtgtgaatgggaaatacatttctcagatgaaagcctgtgatggtatcaatgattgtggagaccaaagtgatgaactgtgttgtaaagcatgccaaggcaaaggcttccattgcaaatcgggtgtttgcattccaagccagtatcaatgcaatggtgaggtggactgcattacaggggaagatgaagttggctgtgcaggctttgcatctgtggctcaagaagaaacagaaattttgactgctgacatggatgcagaaagaagacggataaaatcattattacctaaactatcttgtggagttaaaaacagaatgcacattcgaaggaaacgaattgtgggaggaaagcgagcacaactgggagacctcccatggcaggtggcaattaaggatgccagtggaatcacctgtgggggaatttatattggtggctgttggattctgactgctgcacattgtctcagagccagtaaaactcatcgttaccaaatatggacaacagtagtagactggatacaccccgaccttaaacgtatagtaattgaatacgtggatagaattattttccatgaaaactacaatgcaggcacttaccaaaatgacatcgctttgattgaaatgaaaaaagacggaaacaaaaaagattgtgagctgcctcgttccatccctgcctgtgtcccctggtctccttacctattccaacctaatgatacatgcatcgtttctggctggggacgagaaaaagataacgaaagagtcttttcacttcagtggggtgaagttaaactaataagcaactgctctaagttttacggaaatcgtttctatgaaaaagaaatggaatgtgcaggtacatatgatggttccatcgatgcctgtaaaggggactctggaggccccttagtctgtatggatgccaacaatgtgacttatgtctggggtgttgtgagttggggggaaaactgtggaaaaccagagttcccaggtgtttacaccaaagtggccaattattttgactggattagctaccatgtaggaaggccttttatttctcagtacaatgtataaaattgtgatctctctcttcattctattctttttctctcaagagttccatttaatggaaataaaacggtataattaataattctctaggggggaaaaatgaagcaaatctcactggatatttttaaaggtctccacagagtttatgccatattggaattttgttgtataattctcaaataaatattttggtgaagcatacaa

SEQ ID NO: 134 - DNA, 3120 bp, Homo sapiens
cgctgcctgcggcccgccgagccccgccacctccctcgggctgcagctcccggcgtgccccgcactctccgctgcccacccgctcgcccgcccctccttctcctcccagtgccacagagccgaagcccgagctgccgccgcagccacagccgagggcactatggcttctggagttacagtgaatgatgaagtcatcaaagtttttaatgatatgaaagtaaggaaatcttctacacaagaggagatcaaaaagagaaagaaagcagttctcttctgtttaagcgatgacaaaagacaaataattgtagaggaagcaaagcagatcttggtgggtgacattggtgatactgtagaggacccctacacatcttttgtgaagttgctacctctgaatgattgccgatatgctttgtacgatgccacatacgaaacaaaagagtctaagaaagaagacctagtatttatattctgggctcctgaaagtgcacctttaaaaagcaagatgatttatgctagctctaaagatgccattaaaaagaaatttacaggtattaaacatgagtggcaagtaaatggcttggatgatattaaggaccgttcgacacttggagagaaattgggaggcaatgtagtagtttcacttgaaggaaaaccattataaaatgacagtcaagtgccatctggatcttaaggagcttccatttctccagctcagtccattggaatagtattaggttttggttttttgttgtatttccccctttccactgggcccttccaacacaatgaatgaaggaaatatcatttatttaagcagcctatcagtgattgccattagactgttgaatactgttacttttatatagaacccaaggaatgccttcctgtcatattttagccaaaacaactggttatatgcctcccttgcagcaagcactacaatgtatgtgatcgtcaatgtgaatagcttagaatactgcaaaggataagctaattgaatgccttgaaagtattatccactggtcagatggtcaacttttttcagtattatttatagttggcacttgattgcagttctgtgaggcttgagcattcatacacctcacctgccttggcaagcctattttagtgatatggcagcacggatataacactatgcattaaaagcactttttgtaataagtttaatatcctaaaaggaatgccaattaagttttgttaactgtgtcatcaacttatcctagtacctcagtgttcattcctgttacctgcatatcttcttaaaagaaatagctgttattaatgcctttttgttttccattgagtgtacactactgaataagtgtaggagttttatgtttaccatgtgagtcctgcaacactaaagatattttgaatatcagtcatgatggcaatttctgtataaaagagccttaaatggaacattgttttgagatcaaactccccaccctcacaaaaatggccacgttgcaataaaaattgtggcatattacagaacgttgccttgttttccttggaaattttgcaaaatgttatgtgaaacaacttctagggtaaaaacagctattactaatctctgcactggtcatttgagaattttttttgtacagcattcatgtgtgatattttccagatttgttggatctatttggtttaaaaagtattctatcttaaggccaactaatataaaataccattgttaaagaatggtacttttataaacattagtgtatttatttcctatgtgttaatatgaagatcagaaattattttttgcactttggcataaatacttttcaatatctgatttgttctctggataaattagcatagttatttttttattcacatttacatttctaagtagttgtatagtagaagcaggaagctcttattgcttatttggtcgtaatgaaaataatttgtaaaatgtcctttaaaagtttaatgatacttctgatgtttcggaacagtcatttcacctactatttctgaatatattttgcaaattgaattggaataggaattgataatagcagtcttaaacattagtagtgggatttggctatggtccagactgtgctccttatagagaatttgatctgctcagtgtgagcggtttgctgttagccagggctatttatggcaaacacatgcttttgtatcttgtcatagttatccacaaatggcaaaactggacttgattctactggtatgcaaaacaggcatgctagtaagcagtcagtcgtggctcagaacttaaccccatagctcagaggaatgcttttagcagaaaacaggaaagaaaatatcccttaaaaattttttttgaatgtgtggaagtaattttagtataattagattttttccatatttttgaaagatttttcagatgtgaacattaaaaatagggattaaatgtctaggcttccatttaaaattatatgaatggtttgggatctttttgcactgagcaattttatttcaggcttccagctgtccctgtgagttatcctggacatttcgatggtttttggtaaggccaaactctgataagcaaaacagagaatactgacgtatacttaaccatatgtgtaactgatacttggcaccatggaatttttcattgagttatttcctcattcttttaaaaaataagggactataaatcagttatgtagtatcttttgtttttgtagctgattccttaactttcttgtatgcctctagtaatttcagagattaaatattgctttaaactgtgatactttgatttgctagattgacaaaactgatactaatataattaagttcatctttgaaatacatctttgtgcgtagagccaaaaaaagagataaaattaataatagttcacttgttatttgagattaatttggcatttgaaatgatcattttattttacaatcatttataatgaatcaatgttccagttagctttaaaaggtatacggtgctaattagtaaaatattgaaggcaatattttactgctagcttgcaaagttatgagagtttaaaaaataaaatatatgaaaatatgtaaagctgttgagatgtgtttacttatacttcagaacat

SEQ ID NO: 135 - DNA, 7235 bp, Homo sapiens
actccggccgggctctgctggctgcggcgggagctggacgcgggaggaggcggcggcggcgctggaacagtgaaccatggagctgtatttcggtgaatatcaacatgtgcagcaggaatatggggtccatctgagactcgcaagtgatgatacccaaaaatcaaggagttcccagaactccaaggcaggctcctacggtgtcagtattcgggtccagggaattgatggtcacccctatattgtcctgaataacacagaacggtgcctagcaggcacatcgttttctgaaaatgggccaccctttccacctccagtgataaataacctgcctctacattccagcaatggttctgtgccaaaggagaacagtgaagaacttcagcttccagaaaacccatacgcccagcctagcccaataagaaacctgaaacagcccctgctccatgagggcaagaatggagttctagatcgcaaagacgggtctgtgaagccatctcacctgctgaactttcagaggcatccagagcttttgcaaccctatgaccctgaaaagaatgagttgaatttacaaaatcaccagccttctgagagtaattggctaaaaacgttgacagaagaaggcatcaacaataagaagccttggacttgctttcccaaacctagcaattcccagcctaccagtccctccttggaagacccggccaaatctggtgtgacagctattcgtttatgcagctccgtggtcatagaggaccccaaaaagcagacctcagtgtgtgtaaacgttcagagctgcaccaaggagagggtgggagaggaggcccttttcactagcgggaggcccctgactgcccacagcccacatgcccaccctgaaaccaagaaaaccaggccagatgttcttcccttccggcgacaggattcagcgggacccgtcctggatggagctcggtcccggaggtcctcctcgtcatccacaactcccacgtcagccaactctttgtacaggtttttactggatgatcaggaatgtgccatccatgccgacaacgtcaatcgtcatgaaaacagaaggtatattcccttcctgccaggaactggacgggatattgatacaggatcaattcctggtgtggatcagttaattgaaaaatttgatcaaaaacctgggcttcagagaagaggaaggtctgggaagcgaaacagaattaatacagatgacaggaaaagatccagaagcgtggatagcgcctttccttttggcctccaagggaactcggagtacctgattgaattcagtaggaacttgggcaagtcaagcgaacacctcctccggccttcccaggtgtgcccgcagcggccactgtctcaggagcgccgtgggaaacagagcgtgggccgcacctttgcaaagctgcagggagcagcgcacggggcttcatgtgcccactccaggcctccccagccgaacatagatgggaaagttctggaaaccgaaggtagtcaggaaagtacagtgatccgtgcgccctcccttggtgcacagagtaaaaaggaggaggaggtgaaaacagccaccgctacgctgatgttacagaaccgggcaacagcaacttcgcctgattctggtgccaagaaaatttccgtgaagacatttccttcggcctcaaatactcaggccacaccggatctcttaaagggccagcaagagctcactcagcaaaccaatgaggagacagctaagcagattctctacaattacctcaaagaaggaagcactgataatgacgatgctactaaaaggaaagtcaacttggtctttgagaaaatccagaccttaaagtctcgagcagctgggagcgcccaaggaaataaccaagcttgtaattccacatctgaagtcaaagatctattggaacagaaaagcaagttgaccatagaagtggctgaacttcagagacagcttcaactggaagtcaagaatcaacagaacattaaagaagagagagagaggatgagagcaaacctagaagagctccgaagccaacacaacgaaaaggtggaggagaactccacattgcagcaacgactggaagaaagtgaaggggagctccggaagaatctggaggagctattccaggtgaagatggaacgggagcagcatcagactgagatcagggatctccaggaccagctctcagaaatgcacgatgaactggacagtgcaaagcgatcggaggacagggagaagggagctctgattgaggagctcttacaggcaaaacaggatcttcaagatctgctgattgccaaagaggagcaagaagacctcttgagaaagcgagagcgtgaactcaccgccctgaagggagccctgaaagaagaggtttccagccatgatcaggagatggacaagctgaaggagcaatatgatgctgagttgcaggccctgagggagagtgtggaagaagcaaccaagaatgtcgaggtcttggcgagcaggagcaacacttcagagcaagaccaggcggggactgaaatgcgcgtgaagcttctgcaggaggagaatgagaagctgcagggaagaagcgaagagctggagcggagagttgctcagcttcaaaggcagatcgaggacctgaaaggcgatgaagccaaggcgaaggaaacgctgaagaagtacgagggagaaatacgacagttagaggaggcccttgtgcacgccagaaaggaagaaaaagaagctgtgtcagccagaagggccctggagaatgaactggaggctgctcagggaaatctgagtcagactacccaggagcagaagcagttgtctgagaagctcaaagaggagagtgagcagaaggagcagctaagaaggttgaagaacgagatggagaatgagcggtggcacctgggcaaaaccattgagaaactgcagaaggagatggcagacattgttgaggcctcccgtacctcaaccctggagctccagaaccagctggatgagtataaggagaaaaaccgcagggagctcgcagaaatgcaaagacagttgaaggagaaaacgctggaggcagaaaagtcccgactgacagccatgaaaatgcaggatgagatgcgtctgatggaggaagagttacgggactaccagagagctcaggatgaagcactcacaaaaaggcagcttctggagcagacgctgaaggacctggagtatgagctggaagccaagagtcacctcaaagatgaccgcagcaggctggtcaagcagatggaggacaaggtgtctcaactggagatggaactggaagaagagagaaacaactcagatttgctgtctgagaggatcagtaggagcagggaacagatggagcagttgaggaatgagctacttcaggagagagctgcgagacaagacttggagtgcgacaagatttccctggagaggcagaacaaggacttaaagagccggattatccacctggaaggttcctacaggtccagcaaagaggggctggttgtgcagatggaggccaggatcgcggagctggaggaccgcctggagagtgaggagagggatcgggccaatcttcagctcagcaaccggcggctggagcggaaagtgaaggagctggtgatgcaggtggatgatgagcacctgtcattgactgatcagaaggaccagctgagcttgcgtttgaaagccatgaagcggcaggtggaggaggctgaggaggaaatcgacagactggaaagttctaaaaagaagctgcagagggagctggaggagcagatggacatgaatgagcatctgcaggggcagctcaactccatgaagaaggacttaagactgaagaagctgccgagtaaagtgctggatgacatggatgacgacgatgacctcagcacggatgggggaagcctctatgaggcgcctgtgagctacacattctccaaggacagcaccgtcgccagccagatctgagtgctctcccgggctgtggaagtacctgtcattcctgcaggagctgcagccacccaaagtgggaggcagggaggggagcatctgtctgccactgagaccaatcacagcctctttgcacagcatgccagctcctcagtgttacattcctcgccagggtctctcagtgggtcttcgacagagagcttttgcagtttaaaatgttgggatgcctgaggaccaggagccaccacccactggggtgttgtgagagatacactttggtaggctgaggcccctgttccacagccactatttgcattgctgtccctgccccctcatcactccccctgccaagacaaagggtccagaaggctaggacttacttaatagcactgtgcagggaggaaaccatgtatagcttgtacatattttaaaccagaccttctcacgaactgctgctgttgggtttggaatgtgatggaggcttggtagggtggctggtttgtaaagttcatgcatctatattgagtattctttttttttttttttgagatggagtttcattcttgttgccgaggctggagtgcaatggcgcaaccttggctcactgcaacctctgcctccctggttcaagtgattctcctgcctcatcctcccaagaagctgagattacagatgaccaccaccactcctggctaattttttgtatttagtagagacggggtttcaccatgttggtcaggctggtcttgaactcctgacctcaggtgatccacctgcctcagcctcccaaagtgctgagattacaggcatgagccaccacgcccagccattgagtattcttttttaaaatatgaagctattagattttaagtgttgaggagcagaggtgagaagagagagagagagagaaagtcaaataaagtcaaagaccagtttggaaaccaaagttggaaaagaagaattgtagtggtcatggacagctaagactgagcatagcagttcacatggtctgggtaaacaagtcactggcacaggggaaagccagaaggttgcttgtgtctgtgactgcagctatggccttgtttgcttagtttatctggaattctgttataatttctgaactgttctgagacctgttcccagtcactgattgcaatttcttttacacaggttgggtagggagagttgtaggtaaggccttaaacaaatgaggccgtttctggaaggatagggctgtgtggtcatgtcccacagcaagcttttgggatcgggggaataagagggtatgggggaaaggttcatagacttaggtgtgagaatgaggtgggaggtgtctggtaaggtcatgggggaagggagatgagagaggagataggcagatgtgggtatggggcccagtgtgagaaggaagacagagaagttcttgaaagctgggggatgtgtgggcaagaggtggattgagcaggatctcagggttatgtcgaggaagggaagaaagaaacagaagtcaggcagaggcgtgtctgtgcaaactggaggactccttccaacttcctggaacaaagcgacatcgccagcagcaggctggcagggagtggttgaggtctgggggccaggccacatggctggagaggaatttcagggagcatagcatcgggaggatgctacatatccagggactccctcctggccttcctgtgtcacttcacaatgtgacagtccccaggcatgcccacaggccaggcccagtcacagctgggcttccacaggtcagaatatgggacaggacatggtcagggagaggaccctgtgagttggtgacatatatgtggcagagatggtagtgttcagctgcttcagcagtgtccccaaccatcccaatagggtgggggcctgtgggccagaggactccatgacagtagccatggagtcccacctgtgccaggtcagagcccacccggcaggtttcagagtggtcagcccagtttaagggtgggagtctggagccagacagccaagccccttccacatctacagggtcactgtcatcctcaccacagccaggggtgattctcacctctgcctgcttatgtggggtgtggccgattcctccctttagtcattcattcatttagcacatatttattgggcatcggtgatgtgtcaggcacagtccttggcacacagaatacagcagtgaattaaacaggcaaaaattcctcccctcctggagctcagtgtcaggaaagggggtgataaatgacaatcaaatcgacatggaggttgagcacctctgtactcagccctctgtctgtccttctgaggacgcaacaagcctggttccctagagctcactttgaccctcaatatgttcataatttccctgctgcttctcccatcgttagacatctgccagtaagcctgctgagagaagcctcagcccactcatacctagagacgctgctggggaaggtcagcacacccaagaactttgggagtgtgtgtctgttttggtttgtgagaaagtagctgcccctcattctggccagttctttccagtagccatggggctggctacaagaagcaaaactgcccatgcaaagagaacacaggtcacttttcaaaacacttgcatcattaccctaaaaataggctgttatgcgttttgacaattgcgctatcctacactctgagggagttggcaacgcatgcggtatagtggagtgggaagagttgagactgaaagttaagagaagggttttcaagtcccggctcatctcaccccagtgactttgacagtgtgctcactctcagagccatggattacctggaacaaagtgcagattagtgcccacggtcctttccaggtataacatgctatcgttctttaattttattatatatacatacttttcttctgttttttgctttaagaactaaccccgatcaagagtattttctttagctagcttaaaaagaaaacatatattttatgtaaaaacacatacatggccaaatgcaatactgaagagacaatcatcctgtatcttttatggtttttcctgcttctgagtgtcgttctacaatgcccgttgacttattccattgcgtctctgctttagggtatggtttggtcgctttggttgtcatgagaaagagacattctccttgcagctacctccatgtgagtgaattcctggataaagcaagatttcctttcaataaacgctgtcacccaatgggaattttgaaaaaaaaaaaaaaaaaa

SEQ ID NO: 136 - DNA, 1378 bp, Homo sapiens
agctgccttgcacagcctcgcaatgagctgccacaactgctccgacccccaggtcctttgcagctccgggcagctgttcctgcagcccctctgggaccacctgaggagctgggaggccctcctacagtcgcccttcttcccggtcatcttctccatcaccacatacgtgggcttttgcctgcccttcgtggtcctggatatcctgtgctcctgggtgcccgccctgcggcgctacaagatccaccctgacttctcgccatccgcgcagcagctgctaccttgcctggggcagaccctctaccagcatgtgatgtttgtgttccccgtgacgctgctgcattgggcccgcagcccggccctcctgccccacgaagctcccgagctgctcctgctgctgcaccacatcctgttctgcctgctactcttcgacatggagttcttcgtgtggcacctgctgcaccacaaggtgccctggctgtaccgcaccttccacaaggtgcaccaccagaactcgtcctcgttcgcgctggcaacgcagtatatgagcgtctgggaactgttttctttgggcttcttcgacatgatgaacgtcacactgctcgggtgccacccgctcaccaccctgaccttccacgtggtcaacatctggctttccgtggaggaccactccggctacaacttcccttggtccactcacagactggtgcccttcgggtggtacgggggtgtggtgcaccacgacctgcatcactctcactttaactgcaacttcgctccgtactttacacactgggacaaaatactgggaacgctgcggactgcatctgtcccagcgcggtgatgtggctgcggtgggtgcccctaagactcgggactgctgtgcctttcacacttgaatgaagagaaacacctgagctatatatttttttaaagcaactaacttattgctttatgtttatctatgaaaaccatagataaaatctgatgcatttttgtaatctgacaaagtaatttacatactgtttgtgtatcaatacaattttgtgttcttggtattcttagtctagctcacctcaatagccttgaatcctgcatatgaattagacattcatcactggcatatttagaatatctctaaaaggacttgtttgtagaataaggaattttctatgtttcaaagtgttctaaaacctggctaaaagaatgtatttttgtggatggtgttgacttctgactctaaaagcaatcaaacatgtttctgctggacagtgaccaagaattatagtaccttcttatatttttttatagaactgtatatttattttgaaagaaatgttattcgtgctttaaaaaggaaaaaaaaccatgaatcaaataa

SEQ ID NO: 137 - DNA, 1867 bp, Homo sapiens
cacatagctcagttcccataaaagggctggtttgccgcgtcggggagtggagtgggacaggtatataaaggaagtacagggcctggggaagaggccctgtctaggtagctggcaccaggagccgtgggcaagggaagaggccacaccctgccctgctctgctgcagccagaatgggtgtgaaggcgtctcaaacaggctttgtggtcctggtgctgctccagtgctgctctgcatacaaactggtctgctactacaccagctggtcccagtaccgggaaggcgatgggagctgcttcccagatgcccttgaccgcttcctctgtacccacatcatctacagctttgccaatataagcaacgatcacatcgacacctgggagtggaatgatgtgacgctctacggcatgctcaacacactcaagaacaggaaccccaacctgaagactctcttgtctgtcggaggatggaactttgggtctcaaagattttccaagatagcctccaacacccagagtcgccggactttcatcaagtcagtaccgccatttctgcgcacccatggctttgatgggctggaccttgcctggctctaccctggacggagagacaaacagcattttaccaccctaatcaaggaaatgaaggccgaatttataaaggaagcccagccagggaaaaagcagctcctgctcagcgcagcactgtctgcggggaaggtcaccattgacagcagctatgacattgccaagatatcccaacacctggatttcattagcatcatgacctacgattttcatggagcctggcgtgggaccacaggccatcacagtcccctgttccgaggtcaggaggatgcaagtcctgacagattcagcaacactgactatgctgtggggtacatgttgaggctgggggctcctgccagtaagctggtgatgggcatccccaccttcgggaggagcttcactctggcttcttctgagactggtgttggagccccaatctcaggaccgggaattccaggccggttcaccaaggaggcagggacccttgcctactatgagatctgtgacttcctccgcggagccacagtccatagaatcctcggccagcaggtcccctatgccaccaagggcaaccagtgggtaggatacgacgaccaggaaagcgtcaaaagcaaggtgcagtacctgaaggacaggcagctggcgggcgccatggtatgggccctggacctggatgacttccagggctccttctgcggccaggatctgcgcttccctctcaccaatgccatcaaggatgcactcgctgcaacgtagccctctgttctgcacacagcacgggggccaaggatgccccgtccccctctggctccagctggccgggagcctgatcacctgccctgctgagtcccaggctgagcctcagtctccctcccttggggcctatgcagaggtccacaacacacagatttgagctcagccctggtgggcagagaggtagggatggggctgtggggatagtgaggcatcgcaatgtaagactcgggattagtacacacttgttgattaatggaaatgtttacagatccccaagcctggcaagggaatttcttcaactccctgccccccagccctccttatcaaaggacaccattttggcaagctctatcaccaaggagccaaacatcctacaagacacagtgaccatactaattataccccctgcaaagcccagcttgaaaccttcacttaggaacgtaatcgtgtcccctatcctacttccccttcctaattccacagctgctcaataaagtacaagagcttaacagtgaaaaaaaaaaaaaaaaaaaaaaaaaaaaaa

SEQ ID NO: 138 - DNA, 4914 bp, Homo sapiens
cccgggccggggcacggagagagccgagcgccgcagccgtgagccgaatagagccggagagacccgagtatgaccggagaagcccaggccggccggaagaggagccgagcgcggccggaaggaaccgagcccgtccgaagggagcggagcgcagcctggcctggggcccggtcgagcccgcgccatggcggccgaggcgacagctgtggccggaagcggggctgttggcggctgcctggccaaagacggcttgcagcagtctaagtgcccggacactaccccaaaacggcggcgcgcctcgtcgctgtcgcgtgacgccgagcgccgagcctaccaatggtgccgggagtacttgggcggggcctggcgccgagtgcagcccgaggagctgagggtttaccccgtgaggtgggaggtcaggggtcagcctctccggtgcgcggatcggggtcaggggtcagccgcggggccctcaggatgctccatgttttcgcccccctcttgcgcccgcgcctggggcggggcggggccggcctggccgggagggggccggggccgcggcaggtagggccggccgcgggctgagcgcgcctggtgtgggtctgcagcggaggcctcagcaacctgctcttccgctgctcgctcccggaccacctgcccagcgttggcgaggagccccgggaggtgcttctgcggctgtacggagccatcttgcaggtgaggggggtgtgagcgccgcagcaccagtggctttagggcctgtcgcttacgcgatgcgggtagtattgttcccgttgcgcagttgaggacaccgaggttcacggtctgagtaacacctcattacaccgaagcctgggcctgtattcccagagctttgggaggctgaggcgagaggatcacttgagcacaggagttcgagaccagcctggacaacatagtgagacccccatctctaaataaaaatagaccaacgctaaagcctgtgctccagagcctccaggcaattggatcagaagtcgcagctctggtgggaggaaggcgagccctcatgtgtgtccctgtgccactttgccttggcccctttgctgtccatcctttttcagggcgtggactccctggtgctagaaagcgtgatgttcgccatacttgcggagcggtcgctggggccccagctgtacggagtcttcccagagggccggctggaacagtacatcccaagtcggccattgaaaactcaagagcttcgagagccagtgttgtcagcagccattgccacgaagatggcgcaatttcatggcatggagatgcctttcaccaaggagccccactggctgtttgggaccatggagcggtacctaaaacagatccaggacctgcccccaactggcctccctgagatgaacctgctggagatgtacagcctgaaggatgagatgggcaacctcaggaagttactagagtctaccccatcgccagtcgtcttctgccacaatgacatccaggaaggtaggagaaggcatctgagtctcctaacccaagatggaagagccagagggctctggagtgagcagaacctcaccccattcccccagggaacatcttgctgctctcagagccagaaaatgctgacagcctcatgctggtggacttcgagtacagcagttataactataggggctttgacattgggaaccatttttgtgagtgggtttatgattatactcacgaggaatggcctttctacaaagcaaggcccacagactaccccactcaagaacagcagttgcattttattcgtcattacctggcagaggcaaagaaaggtgagaccctctcccaagaggagcagagaaaactggaagaagatttgctggtagaagtcagtcggtatgctctggcatcccatttcttctggggtctgtggtccatcctccaggcatccatgtccaccatagaatttggttacttggactatgcccagtctcggttccagttctacttccagcagaaggggcagctgaccagtgtccactcctcatcctgactccaccctcccactccttggatttctcctggagcctccagggcaggaccttggagggaggaacaacgagcagaaggccctggcgactgggctgagcccccaagtgaaactgaggttcaggagaccggcctgttcctgagtttgagtgccgaccaacccccaggatggcggaagctcaccaggccgtggccttccagttcacggtgaccccagacggggtcgacttccggctcagtcgggaggccctgaaacacgtctacctgtctgggatcaactcctggaagaaacgcctgatccgcatcaagaatggcatcctcaggggcgtgtaccctggcagccccaccagctggctggtcgtcatcatggcaacagtgggttcctccttctgcaacgtggacatctccttggggctggtcagttgcatccagagatgcctccctcaggggtgtggcccctaccagaccccgcagacccgggcacttctcagcatggccatcttctccacgggcgtctgggtgacgggcatcttcttcttccgccaaaccctgaagctgcttctctgctaccatgggtggatgtttgagatgcatggcaagaccagcaacttgaccaggatctgggctatgtgtatccgccttctatccagccggcaccctatgctctacagcttccagacatctctgcccaagcttcctgtgcccagggtgtcagccacaattcagcggtacctagagtctgtgcgccccttgttggatgatgaggaatattaccgcatggagttgctggccaaagaattccaggacaagactgcccccaggctgcagaaatacctggtgctcaagtcatggtgggcaagtaactatgtgagtgactggtgggaagagtacatctaccttcgaggcaggagccctctcatggtgaacagcaactattatgtcatggaccttgtgctcatcaagaatacagacgtgcaggcagcccgcctgggaaacatcatccacgccatgatcatgtatcgccgtaaactggaccgtgaagaaatcaagcctgtgatggcactgggcatagtgcctatgtgctcctaccagatggagaggatgttcaacaccactcggatcccgggcaaggacacagatgtgctacagcacctctcagacagccggcacgtggctgtctaccacaagggacgcttcttcaagctgtggctctatgagggcgcccgtctgctcaagcctcaggatctggagatgcagttccagaggatcctggacgacccctccccacctcagcctggggaggagaagctggcagccctcactgcaggaggaagggtggagtgggcgcaggcacgccaggccttctttagctctggaaagaataaggctgccttggaggccatcgagcgtgccgctttcttcgtggccctggatgaggaatcctactcctatgaccccgaagatgaggccagcctcagcctctatggcaaggccctgctacatggcaactgctacaacaggtggtttgacaaatccttcactctcatttccttcaagaatggccagttgggtctcaatgcagagcatgcgtgggcagatgctcccatcattgggcacctctgggagtttgtcctgggcacagacagcttccacctgggctacacggagaccgggcactgcctgggcaaaccgaaccctgcgctcgcacctcctacacggctgcagtgggacattccaaaacagtgccaggcggtcatcgagagttcctaccaggtggccaaggcgttggcagacgacgtggagttgtactgcttccagttcctgccctttggcaaaggcctcatcaagaagtgccggaccagccctgatgcctttgtgcagatcgcgctgcagctggctcacttccgggggtaagttctgcctgacctatgaggcctcaatgaccagaatgttccgggagggacggactgagactgtgcgttcctgtaccagcgagtccacagcctttgtgcaggccatgatggaggggtcccacacaaaagcagacctgcgagatctcttccagaaggctgctaagaagcaccagaatatgtaccgcctggccatgaccggggcagggatcgacaggcacctcttctgcctttacttggtctccaagtacctaggagtcagctctcctttccttgctgaggtgctctcggaaccctggcgtctctccaccagccagatcccccaatcccagatccgcatgttcgacccagagcagcaccccaatcacctgggcgctggaggtggctttggccctgtagcagatgatggctatggagtttcctacatgattgcaggcgagaacacgatcttcttccacatctccagcaagttctcaagctcagagacgaacgcccagcgctttggaaaccacatccgcaaagccctgctggacattgctgatcttttccaagttcccaaggcctacagctgaaggttggagaaatgccagctgccctttcgtccccacactgtggaggaagggacctgtggcagctcacaggcatgaggggtggccgtgcacaggtgcccaggctccaaggacagctccggcagcaggtcctcgctgggcagatgctgctccctgagggcccaggtggtggagcccttaggtacctgtgttttgtttgggaactcggaggccctccccctcccccagctcagaccacagaggtggcaagagaagggctgaagctggaagactgttcatgagggacttgtgtgacctgctttgaaatgtgtgactctgctgagtgacgtaggctctgagatagctgtccacgcccacgtgtttgcttggaataaatacttgcctcagaaccttca

SEQ ID NO: 139 - DNA, 1686 bp, Homo sapiens
ggggagcctttggagagaagggagagggcccgtcggacagccacagcggccagcgcagcggcagcggcggcggcaccaccatcaccgctcgcaccccagccgcccggcccgcgaccaggcagcggcggccgccggcgggatcggaggaggcggcgaagcgactccgatcctccctctgagccttgctcagctctgccccgcgcctcccgggctccggtccgcgcggcggggtccctgctcctgcgccccgggcgcgcttcccggacaccccggtccccgcagccaggacaaagccatgaagccagcgctgctggaagtgatgaggatgaacagaatctgccggatggtgctggccacttgcttgggatcctttatcctggtcatcttctatttccaaagtatgttgcacccagtcatgcggaggaatccctttggtgtggacatctgctgccggaaggggtcccgaagccccctgcaggaactctacaacccaatccagctggagctctcaaacactgctgtcctgcaccagatgcggcgggaccaggtgacagacacgtgccgagccaacagcgccacaagccgtaagcggagggtgctgacccccaacgacctgaagcacttggtggtggatgaggaccacgagctcatctactgctacgtgcccaaggtggcctgcaccaactggaagcggctcatgatggtcctgaccgggcgggggaagtacagcgaccccatggagatcccggccaacgaggcacacgtctccgccaacctgaagaccctgaaccagtacagcatcccagaaatcaaccaccgcttgaaaagctacatgaagttcctgtttgtccgggagcccttcgagaggctagtgtccgcctaccgcaacaagttcacccagaagtacaacatctccttccacaagcggtacggcaccaagatcatcaaacgccagcggaagaacgccacccaggaggccctgcgcaaaggggacgatgtcaaattcgaggagtttgtggcctatctcatcgacccacacacccagcgggaggagcctttcaacgaacactggcaaaccgtctactcactctgccatccctgccacatccactatgacctcgtgggcaagtacgagacactggaagaggattctaattacgtcctgcagctggcaggagtgggcagctacctgaagttccccacctatgcaaagtctacgagaactactgatgaaatgaccacagaattcttccagaacatcagctcagagcaccaaacgcagctgtacgaagtctacaaactcgattttttaatgttcaattactcagtgccaagctacctgaaattggaataaagggggtggggagagggagagaatcatgctttttaatttaagatttttatttgtcaaaagaattatatggatattgggttattttgtaaattaatatttctttggggatgatgctgcgagcagcatagtgagaattatttaaaatccttcgtagggaaggacagctgtctttgcaggggaaataggatgggtcgttcttgtctgtagaagtgaatactgcaacactgtctcaaaggtttcttgtgttctggtgaattccatgaattgtgcattccataaattctaattaatattatttatagcaaaaaaaaaaaaaaaaaaaaaaaaaaaaa

SEQ ID NO: 140 - DNA, 1747 bp, Homo sapiens
atggggaggcgctgctgccggcggcgcgtgctggcggccgcctgtctgggcgccgcgctcctgctcctatgcgccgcgccccgctccctgcgcccggcatttggaaacagagccctgggctccagctggcttggtggggagaagagaagccccctgcagaagctctatgacctggatcaggacccgcgctcgaccctggcgaaggtgcaccgtcagcggcgcgacctgctgaacagcgcctgtagccgccactcacgccggcagcgcctgctacagccggaggacctgcggcacgtgctggtggacgacgcgcatggcctgctctactgctacgtgcccaaggtggcctgcaccaactggaagcgcgtgctgctggcgctgagcggccaagcccgcggcgacccgcgcgccatctccgcgcaagaggcgcacgcgcctggccgcctgccctcactggccgacttcagccccgccgagatcaaccggcgcctgcgcgcctacttggccttcctgttcgtgcgggagcccttcgagcgcctggcatcggcttaccgcaacaagctcgcgcgcccctacagcgccgccttccagaggcgctacggtgcacgcatcgttcagcgcctgcggccgcgcgcgctccccgacgcccgggcccgcggccacgacgtgcgcttcgcggagttcctggcctacctgctggacccgcgcacgcggcgtgaggagcccttcaacgagcactgggagcgcgcgcacgcgctctgccacccgtgtcgcctccgctacgacgtcgtgggcaagttcgagacgctggcggaggacgcggccttcgtgctgggcctggcgggcgcatccgacctgagcttccctgggccgccgcggccccggggagccgccgcctcccgcgacctggcagcgcgcctcttccgggacatcagccccttctaccagcggcgcctcttcgacctctacaagatggacttcctgcttttcaactactccgccccctcctacctgcggctgctctagcggtcctggaggtcctgtggccacgcggggcaagtgcctttccgacaagacccccggggaatgcaggtgctgccggccccaggacccctcttcaagagccactgcgtgcactcacctggccgccgggccagcgggcgcagggcacacctggccaggcttgggggcagcccatctcaggtggccctgcacgcgtgtgcctgcctcggcctgtcgcctgaggcctgcttcctccacttgctccagctgacaggcacctctccaggccccgtagatgggcaaggacttgataaccagggttttaggcttttaaaggccattttgggggtcagccctgcccctgaacctgttcatggtgcatcagaacataatgctgacaccggtgtcagtgtggcccgagcctgtgtcctccccacctcgcccaccctggcaaggacagctgcggccaaggacgaaagccctcccttggctggcctcacgatggggccgtcccgggagccaggtgggagctgccttccactgccatcgggtctcctctcctctcccacgcggctggccctacccaggcgccaccttcggtctcagtctggcaagacgctgggtcttcaggctccatgccaacagagcccctggtgcaatgcggtcacaggttttatgggactttggtgagctgggcggtcatggttttgaaataaatgtattttgttactttctgaaaaaaaaa

SEQ ID NO: 141 - DNA, 3046 bp, Homo sapiens
agcatcctcctgggcgccgctttcgcgcggcggcggcggctgcggcggggtctttctttgcttaaatacctcgttggccagaagcgctggtaccgggggcgggttgggtcgggtcgggcagtgctgcacacctgggtttccttgcctagagctgtgtgttcggggtcctttggtccagtcggaggctgcggagcggcgggggttgcctgcgctgtccgcccgggcatcctcccggtgatggaagcagccgccgccgccgctgcggggtcgcgctgtgccccatccaccgctgccagagaggtgggaaaattcgccgcacggaggccgaaagcgagaggggctgcgccgctatgccgggagctgagtcccatataagccgcccccagccatcgcccccagccggcttcgttcccctgagcgagacaggaagctgcggtcccgagaaagcggaggagacgtcgctggagccgggaggcgccgggttcggcggagcgcggagcggggctctgggccgcgtgaaagtttttcttcccgagccgcagggcgcccgctgcccggaaactgcccagggataagtcggccgactccccagacccctcgaaggtgcggggacccccagcggaagcgagagggagcgaaatcgaggaacgagtgacagccggacagtccgccgggcggtgatccggggccgctcccgggcgcgccctcggctccaggtcctacccggagccgctgccatgggagagccagccttgggcgctggggaccagccgccgcgcccgcctcggagtcgcggcccgagtcccggcgccagcagccagcccgctgcgtccccttcccgggctgcagggctgcctccgccgcgccgccggcccggattgtgcctgtgatgagccgcagcccgcagcgagctctgcccccgggcgcgctccctcggctgctccaggctgcgcctgcagccgcgccgcgtgccctgctcccgcagtggccccggcgcccaggacgccgctggcccgcgtcccctctcggaatgaaggtgttccgtaggaaggcgctggtgttgtgcgcgggctatgcactgctgctggtgctcactatgctcaacctcctggactacaagtggcacaaggagccgctgcagcagtgcaaccccgatgggccgctgggtgccgcagcgggggcagccggaggcagctgggggcgcccagggccgcctccggccgggccgccccgtgctcatgcccgtttggacctccgcactccttaccgccctcccgctgccgccgtcggggcggctcctgcagccgcggcagggatggcgggggttgcggcccctccaggcaatggcactcggggcaccgggggcgtcggggacaagcggcagctggtgtacgtgttcaccacgtggcgctctggctcgtcgttcttcggcgagctattcaaccagaatcccgaggtgttctttctctacgagccagtgtggcatgtatggcaaaaactgtatccgggggacgccgtttccctgcagggggcagcgcgggacatgctgagcgctctttaccgctgcgacctctctgtcttccagttgtatagccccgcgggcagcggggggcgcaacctcaccacgctgggcatcttcggcgcagccaccaacaaggtggtgtgctcgtcaccactctgccccgcctaccgcaaggaggtcgtggggttggtggacgaccgcgtgtgcaagaagtgcccgccacagcgcctggcgcgtttcgaggaggagtgccgcaagtaccgcacactagtcataaagggtgtgcgcgtcttcgacgtggcggtcttggcgccactgctgcgagacccggccctggacctcaaggtcatccacttggtgcgtgatccccgcgcggtggcgagttcacggatccgctcgcgccacggcctcatccgtgagagcctacaggtggtgcgcagccgagacccgcgagctcaccgcatgcccttcttggaggccgcgggccacaagcttggcgccaagaaggagggcgtgggcggccccgcagactaccacgctctgggcgctatggaggtcatctgcaatagtatggctaagacgctgcagacagccctgcagccccctgactggctgcagggccactacctggtggtgcggtacgaggacctggtgggagaccccgtcaagacactacggagagtgtacgattttgtgggactgttggtgagccccgaaatggagcagtttgccctgaacatgaccagtggctcgggctcctcctccaagcctttcgtggtatctgcacgcaatgccacgcaggccgccaatgcctggcggaccgccctcaccttccagcagatcaaacaggtggaggagttttgctaccagcccatggccgtcctgggctatgagcgggtcaacagccctgaggaggtcaaagacctcagcaagaccctgcttcggaagccccgtctctaaaaggggttcccaggagacctgattccctgtggtgatacctataaagaggatcgtagtgtgtttaaataaacacagtccagactcaaacggaggaagcccacatattctattatagatatataaataatcacacacacacttgctgtcaatgttttgagtcagtgcatttcaaggaacagccacaaaatacacacccctaagaaaaggcaagacttgaacgttctgaccaggtgcccctcttcttctttgccttctcttgtcctctttctcctatttcttaccctgtcctccacctgccttccattttgaagtgggatgttaatgaaatcaagttccagtaacccaaatcttgtttacaaaatattcgtggtatctgtgaacatgttaagagtaatttggatgtgggggtgggggtggagaaaggggaagtggtccagaaacaaaaagccccattgggcatgataagccgaggaggcattcttctaaagcagacttttgtgtaaaaagcaaaggttacatgtgagtattaataaagaagataataaataatattctttttaaaaa

SEQ ID NO: 142 - DNA, 4620 bp, Homo sapiens
ccggaggatgtgcagctgcggcggcggcgccggctacgaagaggacggggacaggcgccgtgcgaaccgagcccagccagccggaggacgcgggcagggcgggacgggagcccggactcgtctgccgccgccgtcgtcgccgtcgtgccggccccgcgtccccgcgcgcgagcgggaggagccgccgccacctcgcgcccgagccgccgctagcgcgcgccgggcatggtcccctcttaaaggcgcaggccgcggcggcgggggcgggcgtgcggaacaaagcgccggcgcggggcctgcgggcggctcgggggccgcgatgggcgcggcgggcccgcggcggcggcggcgctgcccgggccgggcctcgcggcgctagggcgggctggcctccgcgggcgggggcagcgggctgagggcgcgcggagcctgcggcggcggcggcggcggcggcggcggcccggcgggcggagcggcgcgggcatggccgcgcgcggccggcgcgcctggctcagcgtgctgctcgggctcgtcctgggcttcgtgctggcctcgcggctcgtcctgccccgggcttccgagctgaagcgagcgggcccacggcgccgcgccagccccgagggctgccggtccgggcaggcggcggcttcccaggccggcggggcgcgcggcgatgcgcgcggggcgcagctctggccgcccggctcggacccagatggcggcccgcgcgacaggaactttctcttcgtgggagtcatgaccgcccagaaatacctgcagactcgggccgtggccgcctacagaacatggtccaagacaattcctgggaaagttcagttcttctcaagtgagggttctgacacatctgtaccaattccagtagtgccactacggggtgtggacgactcctacccgccccagaagaagtccttcatgatgctcaagtacatgcacgaccactacttggacaagtatgaatggtttatgagagcagatgatgacgtgtacatcaaaggagaccgtctggagaacttcctgaggagtttgaacagcagcgagcccctctttcttgggcagacaggcctgggcaccacggaagaaatgggaaaactggccctggagcctggtgagaacttctgcatgggggggcctggcgtgatcatgagccgggaggtgcttcggagaatggtgccgcacattggcaagtgtctccgggagatgtacaccacccatgaggacgtggaggtgggaaggtgtgtccggaggtttgcaggggtgcagtgtgtctggtcttatgagatgcagcagcttttttatgagaattacgagcagaacaaaaaggggtacattagagatctccataacagtaaaattcaccaagctatcacattacaccccaacaaaaacccaccctaccagtacaggctccacagctacatgctgagccgcaagatatccgagctccgccatcgcacaatacagctgcaccgcgaaattgtcctgatgagcaaatacagcaacacagaaattcataaagaggacctccagctgggaatccctccctccttcatgaggtttcagccccgccagcgagaggagattctggaatgggagtttctgactggaaaatacttgtattcggcagttgacggccagccccctcgaagaggaatggactccgcccagagggaagccttggacgacattgtcatgcaggtcatggagatgatcaatgccaacgccaagaccagagggcgcatcattgacttcaaagagatccagtacggctaccgccgggtgaaccccatgtatggggctgagtacatcctggacctgctgcttctgtacaaaaagcacaaagggaagaaaatgacggtccctgtgaggaggcacgcgtatttacagcagactttcagcaaaatccagtttgtggagcatgaggagctggatgcacaagagttggccaagagaatcaatcaggaatctggatccttgtcctttctctcaaactccctgaagaagctcgtcccctttcagctccctgggtcgaagagtgagcacaaagaacccaaagataaaaagataaacatactgattcctttgtctgggcgtttcgacatgtttgtgagatttatgggaaactttgagaagacgtgtcttatccccaatcagaacgtcaagctcgtggttctgcttttcaattctgactccaaccctgacaaggccaaacaagttgaactgatgagagattaccgcattaagtaccctaaagccgacatgcagattttgcctgtgtctggagagttttcaagagccctggccctggaagtaggatcctcccagtttaacaatgaatctttgctcttcttctgcgacgtcgacctcgtgtttactacagaattccttcagcgatgtcgagcaaatacagttctgggccaacaaatatattttccaatcatcttcagccagtatgacccaaagattgtttatagtgggaaagttcccagtgacaaccattttgcctttactcagaaaactggcttctggagaaactatgggtttggcatcacgtgtatttataagggagatcttgtccgagtgggtggctttgatgtttccatccaaggctgggggctggaggatgtggaccttttcaacaaggttgtccaggcaggtttgaagacgtttaggagccaggaagtaggagtagtccacgtccaccatcctgtcttttgtgatcccaatcttgaccccaaacagtacaaaatgtgcttggggtccaaagcatcgacctatgggtccacacagcagctggctgagatgtggctggaaaaaaatgatccaagttacagtaaaagcagcaataataatggctcagtgaggacagcctaatgtccagctttgctggaaaagacgtttttaattatctaatttatttttcaaaaattttttgtatgatcagtttttgaagtccgtatacaaggatatattttacaagtggttttcttacataggactcctttaagattgagctttctgaacaagaaggtgatcagtgtttgcctttgaacacatcttcttgctgaacattatgtagcagacctgcttaactttgacttgaaatgtacctgatgaacaaaacttttttaaaaaaatgttttcttttgagaccctttgctccagtcctatggcagaaaacgtgaacattcctgcaaagtattattgtaacaaaacactgtaactctggtaaatgttctgttgtgattgttaacattccacagattctaccttttgtgttttgttttttttttttacaattgttttaaagccatttcatgttccagttgtaagataaggaaatgtgataatagctgtttcatcattgtcttcaggagagctttccagagttgatcatttcccctcatggtactctgctcagcatggccacgtaggttttttgtttgttttgttttgttctttttttgagacggagtctcactctgttacccaggctggaatgcagtggcgcaatcttggctcactttaacctccacttccctggttcaagcaattcccctgcctttgcctcccgagtagctgggattacaggcacacaccaccacgcccagctagtttttttgtatttttagtagagacggggtttcaccatgcaagcccagctggccacgtaggttttaaagcaaggggcgtgaagaaggcacagtgaggtatgtggctgttctcgtggtagttcattcggcctaaatagacctggcattaaatttcaagaaggatttggcattttctcttcttgacccttctctttaaagggtaaaatattaatgtttagaatgacaaagatgaattattacaataaatctgatgtacacagactgaaacacacacacatacaccctaatcaaaacgttggggaaaaatgtatttggttttgttcctttcatcctgtctgtgttatgtgggtggagatggttttcattctttcattactgttttgttttatcctttgtatctgaaatacctttaatttatttaatatctgttgttcagagctctgccatttcttgagtacctgttagttagtattatttatgtgtatcgggagtgtgtttagtctgttttatttgcagtaaaccgatctccaaagatttccttttggaaacgctttttcccctccttaatttttatattccttactgttttactaaatattaagtgttctttgacaattttggtgctcatgtgttttggggacaaaagtgaaatgaatctgtcattataccagaaagttaaattctcagatcaaatgtgccttaataaatttgttttcatttagatttcaaacagtgatagacttgccattttaatacacgtcattggagggctgcgtatttgtaaatagcctgatgctcatttggaaaaataaaccagtgaacaatatttttctattgtacttttcgaaccattttgtctcattattcctgttttagctgaagaattgtattacatttggagagtaaaaaacttaaacacgaaaaaaaaaaaaaaaaaaaaaaaaaaaaaaaaaaaaaaaaaaaaaaaaaaaaaaaaaaaaaaaaaaaa

SEQ ID NO: 143 - DNA, 1258 bp, Homo sapiens
ctcgtcaacagctgccgcgcgcaggcttagctcattcctctgacctgccaggaagcagagagacccacagagcaggagggaggcagaaagtggagacggacctgagcccgaggaagaggcaggcagaggctgaggctgattccaccccagcctgcctggacaaccctccttagccgcagccccttccagttccctaggggttctgcccctccccctctctggggcaccagccccccagggtcctgcatcccaccatgtcgatggctgtggaaacctttggcttcttcatggcaactgtggggctgctgatgctgggggtgactctgccaaacagctactggcgagtgtccactgtgcacgggaacgtcatcaccaccaacaccatcttcgagaacctctggtttagctgtgccaccgactccctgggcgtctacaactgctgggagttcccgtccatgctggccctctctgggtatattcaggcctgccgggcactcatgatcaccgccatcctcctgggcttcctcggcctcttgctaggcatagcgggcctgcgctgcaccaacattgggggcctggagctctccaggaaagccaagctggcggccaccgcaggggccctccacattctggccggtatctgcgggatggtggccatctcctggtacgccttcaacatcacccgggacttcttcgaccccttgtaccccggaaccaagtacgagctgggccccgccctctacctggggtggagcgcctcactgatctccatcctgggtggcctctgcctctgctccgcctgctgctgcggctctgacgaggacccagccgccagcgcccggcggccctaccaggctcccgtgtccgtgatgcccgtcgccacctcggaccaagaaggcgacagcagctttggcaaatacggcagaaacgcctacgtgtagcagctctggcccgtgggccccgctgtcttcccactgccccaaggagaggggacctggccggggcccattcccctatagtaacctcaggggccggccacgccccgctcccgtagccccgccccggccacggccccgtgtcttgcactctcatggcccctccaggccaagaactgctcttgggaagtcgcatatctcccctctgaggctggatccctcatcttctgaccctgggttctgggctgtgaaggggacggtgtccccgcacgtttgtattgtgtataaatacattcattaataaatgcatattgtgaccgttc

SEQ ID NO: 144 - DNA, 1716 bp, Homo sapiens
ggtctctgtgtgttctaatccctgttcattctcatttactgtctaaagttgaggagatgggatgtcccagatgatagggctcctgggatttcagacccaagaccagcaggactccagtcacctctaccccagctctccaggacacagcgctcccaactctgagtgacgtcccacctctggtccttgcagcacaaccaacgtgggaatcacaccctccagacctcccacagctccaccccagactgggcgccggccctgcctccatttcagctgtgacaacctcagagccgtgttggcccaagcatgacaaggacgtatgaaaacttccagtacttggagaataaggtgaaagtccaggggtttaaaaatgggccacttcctctccagtccctcctgcagcgtctctgctctgggccctgccatctcctgctgtccctgggcctcggcctcctgctgctggtcatcatctgtgtggttggattccaaaattccaaatttcagagggacctggtgaccctgagaacagattttagcaacttcacctcaaacactgtggcggagatccaggcactgacttcccagggcagcagcttggaagaaacgatagcatctctgaaagctgaggtggagggtttcaagcaggaacggcaggcagttcattctgaaatgctcctgcgagtccagcagctggtgcaagacctgaagaaactgacctgccaggtggctactctcaacaacaatggtgaggaagcctccactgaagggacctgctgccctgtcaactgggtggagcaccaagacagctgctactggttctctcactctgggatgtcctgggccgaggctgagaagtactgccagctgaagaacgcccacctggtggtcatcaactccagggaggagcagaattttgtccagaaatatctaggctccgcatacacctggatgggcctcagtgaccctgaaggagcctggaagtgggtggatggaacagactatgcgaccggcttccagaactggaagccaggccagccagacgactggcaggggcacgggctgggtggaggcgaggactgtgctcacttccatccagacggcaggtggaatgacgacgtctgccagaggccctaccactgggtctgcgaggctggcctgggtcagaccagccaggagagtcactgagctgcctttggtgggaccacccggccacagaaatggcggtgggaggaggactcttctcacgacctcctcgcaagaccgctctgggagagaaataagcactgggagattggaagcactgctaacattttgaatttttttctctttaattttaaaaagatggtatagtgttcttaagcttttattttttttccaacttttgaaagtcaacttcatgaaggtataatttttacataataaaaatgcactcatttaaagagtagagatgactttgacaaatatgcatgcctaggtgactaccactccgatcgcaatagataacattgccatcgcccccaccagtcccctcatgcctctgggcagtccaaccacttccctgtttccaggccagtgatctacttctttttcactatttattggccttgcctcttctagagcttctagaacttcatataagtgaaatcatacactctcgtgtatatacttcatataagtgaatatatactctcgtgagaacttaaaaaaaaaaaaaaaaaa

SEQ ID NO: 145 - DNA, 1788 bp, Homo sapiens
ggtctctgtgtgttctaatccctgttcattctcatttactgtctaaagttgaggagatgggatgtcccagatgatagggctcctgggatttcagacccaagaccagcaggactccagtcacctctaccccagctctccaggacacagcgctcccaactctgagtgacgtcccacctctggtccttgcagcacaaccaacgtgggaatcacaccctccagacctcccacagctccaccccagactgggcgccggccctgcctccatttcagctgtgacaacctcagagccgtgttggcccaagcatgacaaggacgtatgaaaacttccagtacttggagaataaggtgaaagtccaggggtttaaaaatgggccacttcctctccagtccctcctgcagcgtctctgctctgggccctgccatctcctgctgtccctgggcctcggcctcctgctgctggtcatcatctgtgtggttggattccaaaattccaaatttcagagggacctggtgaccctgagaacagattttagcaacttcacctcaaacactgtggcggagatccaggcactgacttcccagggcagcagcttggaagaaacgatagcatctctgaaagctgaggtggagggtttcaagcaggaacggcaggcaggggtatctgagctccaggaacacactacgcagaaggcacacctaggccactgtccccactgcccatctgtgtgtgtcccagttcattctgaaatgctcctgcgagtccagcagctggtgcaagacctgaagaaactgacctgccaggtggctactctcaacaacaatgcctccactgaagggacctgctgccctgtcaactgggtggagcaccaagacagctgctactggttctctcactctgggatgtcctgggccgaggctgagaagtactgccagctgaagaacgcccacctggtggtcatcaactccagggaggagcagaattttgtccagaaatatctaggctccgcatacacctggatgggcctcagtgaccctgaaggagcctggaagtgggtggatggaacagactatgcgaccggcttccagaactggaagccaggccagccagacgactggcaggggcacgggctgggtggaggcgaggactgtgctcacttccatccagacggcaggtggaatgacgacgtctgccagaggccctaccactgggtctgcgaggctggcctgggtcagaccagccaggagagtcactgagctgcctttggtgggaccacccggccacagaaatggcggtgggaggaggactcttctcacgacctcctcgcaagaccgctctgggagagaaataagcactgggagattggaagcactgctaacattttgaatttttttctctttaattttaaaaagatggtatagtgttcttaagcttttattttttttccaacttttgaaagtcaacttcatgaaggtataatttttacataataaaaatgcactcatttaaagagtagagatgactttgacaaatatgcatgcctaggtgactaccactccgatcgcaatagataacattgccatcgcccccaccagtcccctcatgcctctgggcagtccaaccacttccctgtttccaggccagtgatctacttctttttcactatttattggccttgcctcttctagagcttctagaacttcatataagtgaaatcatacactctcgtgtatatacttcatataagtgaatatatactctcgtgagaacttaaaaaaaaaaaaaaaaaa

SEQ ID NO: 146 - DNA, 1167 bp, Homo sapiens
ctgtgattctcactatactggtcctgaggaaagggcttctgtgaactgcggtttttagtttttattgtggttcttagttctcatgagacccctcttgaggatatgtgcctatctggtgcctctgctctccactagttgagtgaaaggaaggaggtaatttaccaccatgtttggttcctgtttataagatgttttaagaaagatctgaaacagattttctgaagaaagcagaagctctcttcccattatgacttcggaaatcacttatgctgaagtgaggttcaaaaatgaattcaagtcctcaggcatcaacacagcctcttctgcagttttctttcaaaaatattctcagcttcttgaaaaaaagactacaaaagagctggttcatacaacattggagtgtgtgaaaaaaaatatgcccgtggaagagacagcctggagctgttgcccaaagaattggaagtcatttagttccaactgctactttatttctactgaatcagcatcttggcaagacagtgagaaggactgtgctagaatggaggctcacctgctggtgataaacactcaagaagagcaggatttcatcttccagaatctgcaagaagaatctgcttattttgtggggctctcagatccagaaggtcagcgacattggcaatgggttgatcagacaccatacaatgaaagttccacattctggcatccacgtgagcccagtgatcccaatgagcgctgcgttgtgctaaattttcgtaaatcacccaaaagatggggctggaatgatgttaattgtcttggtcctcaaaggtcagtttgtgagatgatgaagatccacttatgaactgaacattctccatgaacaggtggttggattggtatctgtcattgtagggatagataataagctcttcttattcatgtgtaagggaggtccatagaatttaggtggtctgtcaactattctacttatgagagaattggtctgtacattgactgattcactttttcataaagtgagcatttattgagcattttttcatgtgccagagcctgtactggaggcccccattgtgcacacatggagagaacatgagtctctcttaatttttatctggttgctaaagaattatttaccaataaaattatatgatgtggtgtctcaaa

SEQ ID NO: 147 - DNA, 1068 bp, Homo sapiens
ctgtgattctcactatactggtcctgaggaaagggcttctgtgaactgcggtttttagtttttattgtggttcttagttctcatgagacccctcttgaggatatgtgcctatctggtgcctctgctctccactagttgagtgaaaggaaggaggtaatttaccaccatgtttggttcctgtttataagatgttttaagaaagatctgaaacagattttctgaagaaagcagaagctctcttcccattatgacttcggaaatcacttatgctgaagtgaggttcaaaaatgaattcaagtcctcaggcatcaacacagcctcttctgcagagacagcctggagctgttgcccaaagaattggaagtcatttagttccaactgctactttatttctactgaatcagcatcttggcaagacagtgagaaggactgtgctagaatggaggctcacctgctggtgataaacactcaagaagagcaggatttcatcttccagaatctgcaagaagaatctgcttattttgtggggctctcagatccagaaggtcagcgacattggcaatgggttgatcagacaccatacaatgaaagttccacattctggcatccacgtgagcccagtgatcccaatgagcgctgcgttgtgctaaattttcgtaaatcacccaaaagatggggctggaatgatgttaattgtcttggtcctcaaaggtcagtttgtgagatgatgaagatccacttatgaactgaacattctccatgaacaggtggttggattggtatctgtcattgtagggatagataataagctcttcttattcatgtgtaagggaggtccatagaatttaggtggtctgtcaactattctacttatgagagaattggtctgtacattgactgattcactttttcataaagtgagcatttattgagcattttttcatgtgccagagcctgtactggaggcccccattgtgcacacatggagagaacatgagtctctcttaatttttatctggttgctaaagaattatttaccaataaaattatatgatgtggtgtctcaaa

SEQ ID NO: 148 - DNA, 1185 bp, Homo sapiens
ctgtgattctcactatactggtcctgaggaaagggcttctgtgaactgcggtttttagtttttattgtggttcttagttctcatgagacccctcttgaggatatgtgcctatctggtgcctctgctctccactagttgagtgaaaggaaggaggtaatttaccaccatgtttggttcctgtttataagatgttttaagaaagatctgaaacagattttctgaagaaagcagaagctctcttcccattatgacttcggaaatcacttatgctgaagtgaggttcaaaaatgaattcaagtcctcaggcatcaacacagcctcttctgcagcttccaaggagaggactgcccctcacaaaagtaataccggattccccaagctgctttgtgcctcactgttgatatttttcctgctattggcaatctcattctttattgcttttgtcaagacagcctggagctgttgcccaaagaattggaagtcatttagttccaactgctactttatttctactgaatcagcatcttggcaagacagtgagaaggactgtgctagaatggaggctcacctgctggtgataaacactcaagaagagcaggatttcatcttccagaatctgcaagaagaatctgcttattttgtggggctctcagatccagaaggtcagcgacattggcaatgggttgatcagacaccatacaatgaaagttccacattctggcatccacgtgagcccagtgatcccaatgagcgctgcgttgtgctaaattttcgtaaatcacccaaaagatggggctggaatgatgttaattgtcttggtcctcaaaggtcagtttgtgagatgatgaagatccacttatgaactgaacattctccatgaacaggtggttggattggtatctgtcattgtagggatagataataagctcttcttattcatgtgtaagggaggtccatagaatttaggtggtctgtcaactattctacttatgagagaattggtctgtacattgactgattcactttttcataaagtgagcatttattgagcattttttcatgtgccagagcctgtactggaggcccccattgtgcacacatggagagaacatgagtctctcttaatttttatctggttgctaaagaattatttaccaataaaattatatgatgtggtgtctcaaa

SEQ ID NO: 149 - DNA, 1284 bp, Homo sapiens
ctgtgattctcactatactggtcctgaggaaagggcttctgtgaactgcggtttttagtttttattgtggttcttagttctcatgagacccctcttgaggatatgtgcctatctggtgcctctgctctccactagttgagtgaaaggaaggaggtaatttaccaccatgtttggttcctgtttataagatgttttaagaaagatctgaaacagattttctgaagaaagcagaagctctcttcccattatgacttcggaaatcacttatgctgaagtgaggttcaaaaatgaattcaagtcctcaggcatcaacacagcctcttctgcagcttccaaggagaggactgcccctcacaaaagtaataccggattccccaagctgctttgtgcctcactgttgatatttttcctgctattggcaatctcattctttattgcttttgtcattttctttcaaaaatattctcagcttcttgaaaaaaagactacaaaagagctggttcatacaacattggagtgtgtgaaaaaaaatatgcccgtggaagagacagcctggagctgttgcccaaagaattggaagtcatttagttccaactgctactttatttctactgaatcagcatcttggcaagacagtgagaaggactgtgctagaatggaggctcacctgctggtgataaacactcaagaagagcaggatttcatcttccagaatctgcaagaagaatctgcttattttgtggggctctcagatccagaaggtcagcgacattggcaatgggttgatcagacaccatacaatgaaagttccacattctggcatccacgtgagcccagtgatcccaatgagcgctgcgttgtgctaaattttcgtaaatcacccaaaagatggggctggaatgatgttaattgtcttggtcctcaaaggtcagtttgtgagatgatgaagatccacttatgaactgaacattctccatgaacaggtggttggattggtatctgtcattgtagggatagataataagctcttcttattcatgtgtaagggaggtccatagaatttaggtggtctgtcaactattctacttatgagagaattggtctgtacattgactgattcactttttcataaagtgagcatttattgagcattttttcatgtgccagagcctgtactggaggcccccattgtgcacacatggagagaacatgagtctctcttaatttttatctggttgctaaagaattatttaccaataaaattatatgatgtggtgtctcaaa

SEQ ID NO: 150 - DNA, 2385 bp, Homo sapiens
agcatagtttcatttcctgctcttgaatatctggttgaactacttaagcttaatttgttaaactccggtaagtacctagcccacatgatttgactcagagattctcttttgtccacagacagtcatctcaggagcagaaagaaaagagctcccaaatgctatatctattcaggggctctcaagaacaatggaatatcatcctgatttagaaaatttggatgaagatggatatactcaattacacttcgactctcaaagcaataccaggatagctgttgtttcagagaaaggggttctttccagcccttgtcctcctaattggattatatatgagaagagctgttatctattcagcatgtcactaaattcctgggatggaagtaaaagacaatgctggcaactgggctctaatctcctaaagatagacagctcaaatgaattgggatttatagtaaaacaagtgtcttcccaacctgataattcattttggataggcctttctcggccccagactgaggtaccatggctctgggaggatggatcaacattctcttctaacttatttcagatcagaaccacagctacccaagaaaacccatctccaaattgtgtatggattcacgtgtcagtcatttatgaccaactgtgtagtgtgccctcatatagtatttgtgagaagaagttttcaatgtaagaggaagggtggagaaggagagagaaatatgtgaggtagtaaggaggacagaaaacagaacagaaaagagtaacagctgaggtcaagataaatgcagaaaatgtttagagagcttggccaactgtaatcttaaccaagaaattgaagggagaggctgtgatttctgtatttgtcgacctacaggtaggctagtattatttttctagttagtagatccctagacatggaatcagggcagccaagcttgagtttttattttttatttatttatttttttgagatagggtctcactttgttacccaggctggagtgcagtggcacaatctcgactcactgcagctatctctcgcctcagcccctcaagtagctgggactacaggtgcatgccaccatgccaggctaatttttggtgttttttgtagagactgggttttgccatgttgaccaagctggtctctaactcctgggcttaagtgatctgcccgccttggcctcccaaagtgctgggattacagatgtgagccaccacacctggccccaagcttgaattttcattctgccattgacttggcatttaccttgggtaagccataagcgaatcttaatttctggctctatcagagttgtttcatgctcaacaatgccattgaagtgcacggtgtgttgccacgatttgaccctcaacttctagcagtatatcagttatgaactgagggtgaaatatatttctgaatagctaaatgaagaaatgggaaaaaatcttcaccacagtcagagcaattttattattttcatcagtatgatcataattatgattatcatcttagtaaaaagcaggaactcctactttttctttatcaattaaatagctcagagagtacatctgccatatctctaatagaatctttttttttttttttttttttgagacagagtttcgctcttgttgcccaggctggagtgcaacggcacgatctcggctcaccgcaacctccgccccctgggttcaagcaattctcctgcctcagcctcccaagtagctgggattacagtcaggcaccaccacacccggctaattttgtatttttttagtagagacagggtttctccatgtcggtcagggtagtcccgaactcctgacctcaagtgatctgcctgcctcggcctcccaagtgctgggattacaggcgtgagccactgcacccagcctagaatcttgtataatatgtaattgtagggaaactgctctcataggaaagttttctgctttttaaatacaaaaatacataaaaatacataaaatctgatgatgaatataaaaaagtaaccaacctcattggaacaagtattaacattttggaatatgttttattagttttgtgatgtactgttttacaatttttaccatttttttcagtaattactgtaaaatggtattattggaatgaaactatatttcctcatgtgctgatttgtcttatttttttcatactttcccactggtgctatttttatttccaatggatatttctgtattactagggaggcatttacagtcctctaatgttgattaatatgtgaaaagaaattgtaccaattttactaaattatgcagtttaaaatggatgattttatgttatgtggatttcatttcaataaaaaaaaactcttatcaaaaaaaaaaaaaaaa

SEQ ID NO: 151 - DNA, 519 bp, Homo sapiens
agcatagtttcatttcctgctcttgaatatctggttgaactacttaagcttaatttgttaaactccggtaagtacctagcccacatgatttgactcagagattctcttttgtccacagacagtcatctcaggagcagaaagaaaagagctcccaaatgctatatctattcaggggctctcaagaacaatggaatatcatcctgatttagaaaatttggatgaagatggatatactcaattacacttcgactctcaaagcaataccaggatagctgttgtttcagagaaaggatcgtgtgctgcatctcctccttggcgcctcattgctgtaattttgggaatcctatgcttggtaatactggtgatagctgtggtcctgggtaccatggctggtttcaaagctgtggaattcaaaggataaattaatgaagaaaacaagcggagctgaagaagaaagtacaatatggtgctgtcttcctaatgaaataaattcactaaatggacattaaaaaaaaaaaa

SEQ ID NO: 152 - DNA, 2484 bp, Homo sapiens
agcatagtttcatttcctgctcttgaatatctggttgaactacttaagcttaatttgttaaactccggtaagtacctagcccacatgatttgactcagagattctcttttgtccacagacagtcatctcaggagcagaaagaaaagagctcccaaatgctatatctattcaggggctctcaagaacaatggaatatcatcctgatttagaaaatttggatgaagatggatatactcaattacacttcgactctcaaagcaataccaggatagctgttgtttcagagaaaggatcgtgtgctgcatctcctccttggcgcctcattgctgtaattttgggaatcctatgcttggtaatactggtgatagctgtggtcctgggtaccatgggggttctttccagcccttgtcctcctaattggattatatatgagaagagctgttatctattcagcatgtcactaaattcctgggatggaagtaaaagacaatgctggcaactgggctctaatctcctaaagatagacagctcaaatgaattgggatttatagtaaaacaagtgtcttcccaacctgataattcattttggataggcctttctcggccccagactgaggtaccatggctctgggaggatggatcaacattctcttctaacttatttcagatcagaaccacagctacccaagaaaacccatctccaaattgtgtatggattcacgtgtcagtcatttatgaccaactgtgtagtgtgccctcatatagtatttgtgagaagaagttttcaatgtaagaggaagggtggagaaggagagagaaatatgtgaggtagtaaggaggacagaaaacagaacagaaaagagtaacagctgaggtcaagataaatgcagaaaatgtttagagagcttggccaactgtaatcttaaccaagaaattgaagggagaggctgtgatttctgtatttgtcgacctacaggtaggctagtattatttttctagttagtagatccctagacatggaatcagggcagccaagcttgagtttttattttttatttatttatttttttgagatagggtctcactttgttacccaggctggagtgcagtggcacaatctcgactcactgcagctatctctcgcctcagcccctcaagtagctgggactacaggtgcatgccaccatgccaggctaatttttggtgttttttgtagagactgggttttgccatgttgaccaagctggtctctaactcctgggcttaagtgatctgcccgccttggcctcccaaagtgctgggattacagatgtgagccaccacacctggccccaagcttgaattttcattctgccattgacttggcatttaccttgggtaagccataagcgaatcttaatttctggctctatcagagttgtttcatgctcaacaatgccattgaagtgcacggtgtgttgccacgatttgaccctcaacttctagcagtatatcagttatgaactgagggtgaaatatatttctgaatagctaaatgaagaaatgggaaaaaatcttcaccacagtcagagcaattttattattttcatcagtatgatcataattatgattatcatcttagtaaaaagcaggaactcctactttttctttatcaattaaatagctcagagagtacatctgccatatctctaatagaatctttttttttttttttttttttgagacagagtttcgctcttgttgcccaggctggagtgcaacggcacgatctcggctcaccgcaacctccgccccctgggttcaagcaattctcctgcctcagcctcccaagtagctgggattacagtcaggcaccaccacacccggctaattttgtatttttttagtagagacagggtttctccatgtcggtcagggtagtcccgaactcctgacctcaagtgatctgcctgcctcggcctcccaagtgctgggattacaggcgtgagccactgcacccagcctagaatcttgtataatatgtaattgtagggaaactgctctcataggaaagttttctgctttttaaatacaaaaatacataaaaatacataaaatctgatgatgaatataaaaaagtaaccaacctcattggaacaagtattaacattttggaatatgttttattagttttgtgatgtactgttttacaatttttaccatttttttcagtaattactgtaaaatggtattattggaatgaaactatatttcctcatgtgctgatttgtcttatttttttcatactttcccactggtgctatttttatttccaatggatatttctgtattactagggaggcatttacagtcctctaatgttgattaatatgtgaaaagaaattgtaccaattttactaaattatgcagtttaaaatggatgattttatgttatgtggatttcatttcaataaaaaaaaactcttatcaaaaaaaaaaaaaaaa

SEQ ID NO: 153 - DNA, 2622 bp, Homo sapiens
agcatagtttcatttcctgctcttgaatatctggttgaactacttaagcttaatttgttaaactccggtaagtacctagcccacatgatttgactcagagattctcttttgtccacagacagtcatctcaggagcagaaagaaaagagctcccaaatgctatatctattcaggggctctcaagaacaatggaatatcatcctgatttagaaaatttggatgaagatggatatactcaattacacttcgactctcaaagcaataccaggatagctgttgtttcagagaaaggatcgtgtgctgcatctcctccttggcgcctcattgctgtaattttgggaatcctatgcttggtaatactggtgatagctgtggtcctgggtaccatggctatttggagatccaattcaggaagcaacacattggagaatggctactttctatcaagaaataaagagaaccacagtcaacccacacaatcatctttagaagacagtgtgactcctaccaaagctgtcaaaaccacaggggttctttccagcccttgtcctcctaattggattatatatgagaagagctgttatctattcagcatgtcactaaattcctgggatggaagtaaaagacaatgctggcaactgggctctaatctcctaaagatagacagctcaaatgaattgggatttatagtaaaacaagtgtcttcccaacctgataattcattttggataggcctttctcggccccagactgaggtaccatggctctgggaggatggatcaacattctcttctaacttatttcagatcagaaccacagctacccaagaaaacccatctccaaattgtgtatggattcacgtgtcagtcatttatgaccaactgtgtagtgtgccctcatatagtatttgtgagaagaagttttcaatgtaagaggaagggtggagaaggagagagaaatatgtgaggtagtaaggaggacagaaaacagaacagaaaagagtaacagctgaggtcaagataaatgcagaaaatgtttagagagcttggccaactgtaatcttaaccaagaaattgaagggagaggctgtgatttctgtatttgtcgacctacaggtaggctagtattatttttctagttagtagatccctagacatggaatcagggcagccaagcttgagtttttattttttatttatttatttttttgagatagggtctcactttgttacccaggctggagtgcagtggcacaatctcgactcactgcagctatctctcgcctcagcccctcaagtagctgggactacaggtgcatgccaccatgccaggctaatttttggtgttttttgtagagactgggttttgccatgttgaccaagctggtctctaactcctgggcttaagtgatctgcccgccttggcctcccaaagtgctgggattacagatgtgagccaccacacctggccccaagcttgaattttcattctgccattgacttggcatttaccttgggtaagccataagcgaatcttaatttctggctctatcagagttgtttcatgctcaacaatgccattgaagtgcacggtgtgttgccacgatttgaccctcaacttctagcagtatatcagttatgaactgagggtgaaatatatttctgaatagctaaatgaagaaatgggaaaaaatcttcaccacagtcagagcaattttattattttcatcagtatgatcataattatgattatcatcttagtaaaaagcaggaactcctactttttctttatcaattaaatagctcagagagtacatctgccatatctctaatagaatctttttttttttttttttttttgagacagagtttcgctcttgttgcccaggctggagtgcaacggcacgatctcggctcaccgcaacctccgccccctgggttcaagcaattctcctgcctcagcctcccaagtagctgggattacagtcaggcaccaccacacccggctaattttgtatttttttagtagagacagggtttctccatgtcggtcagggtagtcccgaactcctgacctcaagtgatctgcctgcctcggcctcccaagtgctgggattacaggcgtgagccactgcacccagcctagaatcttgtataatatgtaattgtagggaaactgctctcataggaaagttttctgctttttaaatacaaaaatacataaaaatacataaaatctgatgatgaatataaaaaagtaaccaacctcattggaacaagtattaacattttggaatatgttttattagttttgtgatgtactgttttacaatttttaccatttttttcagtaattactgtaaaatggtattattggaatgaaactatatttcctcatgtgctgatttgtcttatttttttcatactttcccactggtgctatttttatttccaatggatatttctgtattactagggaggcatttacagtcctctaatgttgattaatatgtgaaaagaaattgtaccaattttactaaattatgcagtttaaaatggatgattttatgttatgtggatttcatttcaataaaaaaaaactcttatcaaaaaaaaaaaaaaaa

SEQ ID NO: 154 - DNA, 2365 bp, Homo sapiens
agcatagtttcatttcctgctcttgaatatctggttgaactacttaagcttaatttgttaaactccggtaagtacctagcccacatgatttgactcagagattctcttttgtccacagacagtcatctcaggagcagaaagaaaagagctcccaaatgctatatctattcaggggctctcaagaacaatggaatatcatcctgatttagaaaatttggatgaagatggatatactcaattacacttcgactctcaaagcaataccaggatagctgttgtttcagagaaaggatcgtgtgctgcatctcctccttggcgcctcattgctgtaattttgggaatcctatgcttggtaatactggtgatagctgtggtcctgggtaccatgggggttctttccagcccttgtcctcctaattggattatatatgagaagagctgttatctattcagcatgtcactaaattcctgggatggaagtaaaagacaatgctggcaactgggctctaatctcctaaagatagacagctcaaatgaattgatttcagatcagaaccacagctacccaagaaaacccatctccaaattgtgtatggattcacgtgtcagtcatttatgaccaactgtgtagtgtgccctcatatagtatttgtgagaagaagttttcaatgtaagaggaagggtggagaaggagagagaaatatgtgaggtagtaaggaggacagaaaacagaacagaaaagagtaacagctgaggtcaagataaatgcagaaaatgtttagagagcttggccaactgtaatcttaaccaagaaattgaagggagaggctgtgatttctgtatttgtcgacctacaggtaggctagtattatttttctagttagtagatccctagacatggaatcagggcagccaagcttgagtttttattttttatttatttatttttttgagatagggtctcactttgttacccaggctggagtgcagtggcacaatctcgactcactgcagctatctctcgcctcagcccctcaagtagctgggactacaggtgcatgccaccatgccaggctaatttttggtgttttttgtagagactgggttttgccatgttgaccaagctggtctctaactcctgggcttaagtgatctgcccgccttggcctcccaaagtgctgggattacagatgtgagccaccacacctggccccaagcttgaattttcattctgccattgacttggcatttaccttgggtaagccataagcgaatcttaatttctggctctatcagagttgtttcatgctcaacaatgccattgaagtgcacggtgtgttgccacgatttgaccctcaacttctagcagtatatcagttatgaactgagggtgaaatatatttctgaatagctaaatgaagaaatgggaaaaaatcttcaccacagtcagagcaattttattattttcatcagtatgatcataattatgattatcatcttagtaaaaagcaggaactcctactttttctttatcaattaaatagctcagagagtacatctgccatatctctaatagaatctttttttttttttttttttttgagacagagtttcgctcttgttgcccaggctggagtgcaacggcacgatctcggctcaccgcaacctccgccccctgggttcaagcaattctcctgcctcagcctcccaagtagctgggattacagtcaggcaccaccacacccggctaattttgtatttttttagtagagacagggtttctccatgtcggtcagggtagtcccgaactcctgacctcaagtgatctgcctgcctcggcctcccaagtgctgggattacaggcgtgagccactgcacccagcctagaatcttgtataatatgtaattgtagggaaactgctctcataggaaagttttctgctttttaaatacaaaaatacataaaaatacataaaatctgatgatgaatataaaaaagtaaccaacctcattggaacaagtattaacattttggaatatgttttattagttttgtgatgtactgttttacaatttttaccatttttttcagtaattactgtaaaatggtattattggaatgaaactatatttcctcatgtgctgatttgtcttatttttttcatactttcccactggtgctatttttatttccaatggatatttctgtattactagggaggcatttacagtcctctaatgttgattaatatgtgaaaagaaattgtaccaattttactaaattatgcagtttaaaatggatgattttatgttatgtggatttcatttcaataaaaaaaaactcttatcaaaaaaaaaaaaaaaa

SEQ ID NO: 155 - DNA, 2503 bp, Homo sapiens
agcatagtttcatttcctgctcttgaatatctggttgaactacttaagcttaatttgttaaactccggtaagtacctagcccacatgatttgactcagagattctcttttgtccacagacagtcatctcaggagcagaaagaaaagagctcccaaatgctatatctattcaggggctctcaagaacaatggaatatcatcctgatttagaaaatttggatgaagatggatatactcaattacacttcgactctcaaagcaataccaggatagctgttgtttcagagaaaggatcgtgtgctgcatctcctccttggcgcctcattgctgtaattttgggaatcctatgcttggtaatactggtgatagctgtggtcctgggtaccatggctatttggagatccaattcaggaagcaacacattggagaatggctactttctatcaagaaataaagagaaccacagtcaacccacacaatcatctttagaagacagtgtgactcctaccaaagctgtcaaaaccacaggggttctttccagcccttgtcctcctaattggattatatatgagaagagctgttatctattcagcatgtcactaaattcctgggatggaagtaaaagacaatgctggcaactgggctctaatctcctaaagatagacagctcaaatgaattgatttcagatcagaaccacagctacccaagaaaacccatctccaaattgtgtatggattcacgtgtcagtcatttatgaccaactgtgtagtgtgccctcatatagtatttgtgagaagaagttttcaatgtaagaggaagggtggagaaggagagagaaatatgtgaggtagtaaggaggacagaaaacagaacagaaaagagtaacagctgaggtcaagataaatgcagaaaatgtttagagagcttggccaactgtaatcttaaccaagaaattgaagggagaggctgtgatttctgtatttgtcgacctacaggtaggctagtattatttttctagttagtagatccctagacatggaatcagggcagccaagcttgagtttttattttttatttatttatttttttgagatagggtctcactttgttacccaggctggagtgcagtggcacaatctcgactcactgcagctatctctcgcctcagcccctcaagtagctgggactacaggtgcatgccaccatgccaggctaatttttggtgttttttgtagagactgggttttgccatgttgaccaagctggtctctaactcctgggcttaagtgatctgcccgccttggcctcccaaagtgctgggattacagatgtgagccaccacacctggccccaagcttgaattttcattctgccattgacttggcatttaccttgggtaagccataagcgaatcttaatttctggctctatcagagttgtttcatgctcaacaatgccattgaagtgcacggtgtgttgccacgatttgaccctcaacttctagcagtatatcagttatgaactgagggtgaaatatatttctgaatagctaaatgaagaaatgggaaaaaatcttcaccacagtcagagcaattttattattttcatcagtatgatcataattatgattatcatcttagtaaaaagcaggaactcctactttttctttatcaattaaatagctcagagagtacatctgccatatctctaatagaatctttttttttttttttttttttgagacagagtttcgctcttgttgcccaggctggagtgcaacggcacgatctcggctcaccgcaacctccgccccctgggttcaagcaattctcctgcctcagcctcccaagtagctgggattacagtcaggcaccaccacacccggctaattttgtatttttttagtagagacagggtttctccatgtcggtcagggtagtcccgaactcctgacctcaagtgatctgcctgcctcggcctcccaagtgctgggattacaggcgtgagccactgcacccagcctagaatcttgtataatatgtaattgtagggaaactgctctcataggaaagttttctgctttttaaatacaaaaatacataaaaatacataaaatctgatgatgaatataaaaaagtaaccaacctcattggaacaagtattaacattttggaatatgttttattagttttgtgatgtactgttttacaatttttaccatttttttcagtaattactgtaaaatggtattattggaatgaaactatatttcctcatgtgctgatttgtcttatttttttcatactttcccactggtgctatttttatttccaatggatatttctgtattactagggaggcatttacagtcctctaatgttgattaatatgtgaaaagaaattgtaccaattttactaaattatgcagtttaaaatggatgattttatgttatgtggatttcatttcaataaaaaaaaactcttatcaaaaaaaaaaaaaaaa

SEQ ID NO: 156 - DNA, 2484 bp, Homo sapiens
catcgaacaaacaactgagatcctgttgtgcctatcacctgttgaagttgccagtcttaaggaaggaatcaatttctttcgcaataagagcactggcaaagactacgtcttgtacaagaataagagccgactgagggcatgcaagaatatgtgcaagcaccaaggaggcctgttcataaaagatatcgaggatttagccggaagttgttgaaatggatgaaaacaacggacttttgcttttagaactgaatcctcctaacccttgggacttacagcccagatctcctgaagagttggcttttggagaagtacagataacatatctcactcatgcctgcatggacctcaagttaggagacaagagaatggtgtttgacccttggttaatcggtcctgcttttgcccgtggatggtggttgctccatgagcctccatctgattggctggagaggctgtgccaggcagacctcatttacatcagtcatctgcactcagaccacctgagttaccccacactgaaaaagcttgctgggagaagaccagatattcccatttatgttggaaacacagaaaggcctgtattttggaatctgaatcagagcggtgtccagttgactaatatcaatgtcgtgccatttggaatatggcagcaggtggacaaaaatcttcgattcatgatcttgatggacggtgttcatcctgagatggacacttgcattattgtggagtacaaaggtcataaaatactcaatatagtagactgcaccagacccaatgggggaaggctgcctatgaaggttgctctaatgatgagtgattttgctggaggagcatcaggctttccaatgactttcagtggtggaaaatttacggaggaatggaaagcccaattcattaaaacagaaaggaagaagctcctgaactacaaggctcggctggtgaagaacctgcaaccccgaatttattgtccctttgctgggtattttgtggaatctcacccatcagacaagtacatcaaggaaacaaacaccaaaaatgacccaaatgaactcaacaatcttatcaagaaaaactctgatgtgataacatggacccctcgaccgggagccacccttgatctgggaagaatgctgaaggatcgaacagacagcaagggcatcatagagcctccagaggggacaaaaatttacaaggattcctgggattttgaaccttatttggaaatcttgaatgctgctctaggagatgaaatatttcttcactcatcctggataaaagaatacttcacttgggctggatttaaagattacaaccttgtggtcaggatgattgagacagatgaggacttcaatccttttcctggaggatatgactatttggttgactttttagatttatccttcccaaaagaaagaccacaacgagaacatccctatgaggaaatccatagccgggtggatgtcatcagacacgtggtgaagaatggtctactctgggatgagttgtatataggattccaaacacggctccagcgggatcctgacatataccatcacctgttttggaatcattttcaaataaaactccccctcacaccacccaactggaagtcattcctgatgtgctgtgagcagaatgggcctgtgattttgcaagaatgcaaaaccacatgaaaatttcaagaattcactgatctgatgcaaaataaaaatttatcattacatcttgaacccaggaagcttacagcaaagagactatgctttatgacgtcagcaatagataattccacgttgcctttgtgatttgtatatatagcttacatttgtggatcactacatagccagattcaaaaatattttacttgttccatccacagttctctacagaaagaaccaatgaacccaataggaacaaattctctgtggaaaacaaagcatagctgtagtagatacgaatccaatcacagaggaaacaggaagagaaaaacatccaagactacagtgaaaactggaaatggtctgttttcgtgatattcgtatgattaagatgcaaattttttcttaggaaaatgtgattgttaactagcattctgttttacatgttgacatttctaacacacacaccactgatttgaacttcaaaatttattttctgattatatatgctaggtctgattctgaagatacaagaattcaatggtggaatttgtctcctgaaatttctagattcataattagaagtgtttattaccaacttctcacttagattaacatcagtgatgtttgattattctggttaaccgctcacatgcataacaataatgctagaaattcaggaattataattttgtgatttatactgtgtggtaaattattcagttctcactgcaaataaatataatgtatatcaatgtaatgtaggtcagaatgtctatggtgagcaaataaaagattattttaaaatatgaaaaaaaaaaaaaaaaaa

SEQ ID NO: 157 - DNA, 2114 bp, Homo sapiens
gagagatgtgggttacaaagctgccatctagaggctagaggctcctttctgcagtgtatataatgcaagtctgcagccagcagagctcacagttgttgcaaagtgctcagcactaagggagccagcgcacagcacagccaggaaggcgagcgagcccagccagcccagccagcccagccagcccggaggtcatttgattgcccgcctcagaacgatggatctgcatctcttcgactactcagagccagggaacttctcggacatcagctggccatgcaacagcagcgactgcatcgtggtggacacggtgatgtgtcccaacatgcccaacaaaagcgtcctgctctacacgctctccttcatttacattttcatcttcgtcatcggcatgattgccaactccgtggtggtctgggtgaatatccaggccaagaccacaggctatgacacgcactgctacatcttgaacctggccattgccgacctgtgggttgtcctcaccatcccagtctgggtggtcagtctcgtgcagcacaaccagtggcccatgggcgagctcacgtgcaaagtcacacacctcatcttctccatcaacctcttcggcagcattttcttcctcacgtgcatgagcgtggaccgctacctctccatcacctacttcaccaacacccccagcagcaggaagaagatggtacgccgtgtcgtctgcatcctggtgtggctgctggccttctgcgtgtctctgcctgacacctactacctgaagaccgtcacgtctgcgtccaacaatgagacctactgccggtccttctaccccgagcacagcatcaaggagtggctgatcggcatggagctggtctccgttgtcttgggctttgccgttcccttctccattatcgctgtcttctacttcctgctggccagagccatctcggcgtccagtgaccaggagaagcacagcagccggaagatcatcttctcctacgtggtggtcttccttgtctgctggctgccctaccacgtggcggtgctgctggacatcttctccatcctgcactacatccctttcacctgccggctggagcacgccctcttcacggccctgcatgtcacacagtgcctgtcgctggtgcactgctgcgtcaaccctgtcctctacagcttcatcaatcgcaactacaggtacgagctgatgaaggccttcatcttcaagtactcggccaaaacagggctcaccaagctcatcgatgcctccagagtctcagagacggagtactctgccttggagcagagcaccaaatgatctgccctggagaggctctgggacgggtttacttgtttttgaacagggtgatgggccctatggttttctagagcaaagcaaagtagcttcgggtcttgatgcttgagtagagtgaagaggggagcacgtgccccctgcatccattctctctttctcttgatgacgcagctgtcatttggctgtgcgtgctgacagttttgcaacaggcagagctgtgtcgcacagcagtgctgtgcgtcagagccagctgaggacaggcttgcctggacttctgtaagataggattttctgtgtttcctgaattttttatatggtgatttgtatttaaattttaagactttattttctcactattggtgtaccttataaatgtatttgaaagttaaatatattttaaatattgtttgggaggcatagtgctgacatatattcagagtgttgtagttttaaggttagcgtgacttcagttttgactaaggatgacactaattgttagctgttttgaaattatatatatataaatatatataaatatataaatatatgccagtcttggctgaaatgttttatttaccatagttttatatctgtgtggtgttttgtaccggcacgggatatggaacgaaaactgctttgtaatgcagtttgtgacattaatagtattgtaaagttacattttaaaataaacaaaaaactgttctggactgcaaatctgcacacacaacgaacagttgcatttcagagagttctctcaatttgtaagttatttttttttaataaagatttttgtttcctaaaaaaaaaaaaaaaa

SEQ ID NO: 158 - DNA, 5273 bp, Homo sapiens
ggagtcgggtttcagagcgcgggtgactcggggcgcgggccgggagccgggattctgcccgccgccgccgctgccgagcgccgcctttgttccctgcaggaagggcgagcgcggcggccagcgctcagcgacccttcgtcctccgctaagctccaacgctctgctcgactagccgcgcgccttccggggctccgcagacccgcgagatggcaccaaggaggaacaacgggcagtgctggtgtctgctgatgctgctctcggtctccacgcccctccctgctgtcacccagacccgcggtgcgacagagactgcttcccagggtcacctggacctcacgcagctcatcggtgtcccgctgccctcgtccgtatcctttgtcacaggctatggtggcttcccggcctacagtttcgggcctggtgccaatgttggccgcccagccaggactctcatcccatccaccttcttcagggacttcgccatcagcgtcgtggtgaagcccagcagcacccgtggtggcgtgctcttcgccatcactgacgccttccagaaggtcatctacctgggcctgcggctctcaggtgtggaggacggccaccagcggatcatcctctactacacggagccaggctcccatgtgtcccaagaggctgctgccttctcggtgcctgtgatgacccacaggtggaaccgcttcgccatgattgtccagggtgaggaagtgaccctcctcgtgaactgtgaggagcacagccgcatccccttccagcggtcctcccaggctttggcttttgagtccagcgctggaatcttcatgggcaatgcaggagctacagggctcgagagattcactggctccctccagcagctcaccgtgcaccccgaccccaggactcccgaggagctgtgtgaccctgaagagtcctcggcatctggagagaccagtgggctgcaggaggcagacggagtagctgagatcttagaagccgtcacctacactcaagcctcgcccaaagaagcaaaagttgaacccataaacacacctccaactccatcctccccctttgaagacatggaactttctggtgaacctgtacccgaggggaccctggaaaccaccaacatgagcatcatccagcacagcagccccaaacaagggtctggtgagatcctgaatgacacactggagggggttcattctgtggatggtgaccccattactgacagcggctcaggggctggggccttccttgacattgctgaagaaaagaatttagcagcaacagcagcggggctggccgaggtgcccatcagcactgctggagaagcagaggccagcagtgtgcccaccgggggaccaaccctctctatgtccacggagaacccagaggaaggggtcactccaggtccagataatgaagagcgtttagcagcaacagcagcaggggaggccgaggcactcgccagcatgcctggggaagtggaggccagtggtgtggcccccggggagctggacctctccatgtccgcccagagcctcggggaagaggccactgtgggtccaagcagtgaagacagtttaacaacagctgcagctgcaaccgaagtgtccctcagtacttttgaggatgaggaagccagtggggtccccacagatggcctggctcccctcacagccaccatggcccctgagcgggcagtcacttctggtcctggtgatgaagaagacttggcagcagccacaacagaggagcccctcatcacagctgggggtgaagagtccggcagccctccccctgatgggccaccgctgcccctgcccacagtggctcctgaaagatggatcactccagctcaaagagaacatgtgggaatgaaaggacaggctgggcccaaaggagaaaagggtgatgctggggaggagcttcctggccctcctgaaccttctgggcctgttggacccacggcaggagcagaagcagagggctctggcctaggctggggctcggacgtcggctctggctctggtgacctggtgggcagtgagcagctgctgagaggtcctccaggacccccagggccacctggcttacctgggattccaggaaaaccaggaactgatgttttcatgggaccccctggatctcctggagaggatggacctgctggtgaacctgggcccccgggccctgagggacagcctggagttgatggagccaccggccttcccgggatgaaaggggagaagggagcaagagggcctaatggctcagttggtgaaaagggtgaccctggcaacagaggcttacctggacccccggggaaaaagggacaagctggccctcctggggtcatgggacccccagggcctcctggaccccctgggcccccaggccctggatgcacaatgggacttggattcgaggataccgaaggctctggaagcacccagctattgaatgaacccaaactctccagaccaacggctgcaattggtctcaaaggagagaaaggagaccggggacccaagggagaaagggggatggatggagccagtattgtgggaccccctgggccgagagggccacctgggcacatcaaggtcttgtctaattccttgatcaatatcacccatggattcatgaatttctcggacattcctgagctggtggggcctccggggccggacgggttgcctgggctgccaggatttccaggtcctagaggaccaaaaggtgacactggtttacctggctttccaggactaaaaggagaacagggcgagaagggagagccgggtgccatcctgacagaggacattcctctggaaaggctgatggggaaaaagggtgaacctggaatgcatggagccccaggaccaatggggcccaaaggaccaccaggacataaaggagaatttggccttcccgggcgacctggtcgcccaggactgaatggcctcaagggtaccaaaggagatccaggggtcattatgcagggcccacctggcttacctggccctccaggcccccctgggccacctggagctgtgattaacatcaaaggagccattttcccaatacccgtccgaccacactgcaaaatgccagttgatactgctcatcctgggagtccagagctcatcacttttcacggtgttaaaggagagaaaggatcctggggtcttcctggctcaaagggagaaaaaggcgaccagggagcccagggaccaccaggtcctccacttgatctagcttacctgagacactttctgaacaacttgaagggggagaatggagacaaggggttcaaaggtgaaaaaggagaaaaaggagacattaatggcagcttccttatgtctgggcctccaggcctgcccggaaatccaggcccggctggccaaaaaggggagacagtcgttgggccccaaggacccccaggtgctcctggtctgcctgggccacctggctttggaagacctggtgatcctgggccaccggggcccccggggccaccaggacctccagctatcctgggagcagctgtggcccttccaggtccccctggccctccaggacagccagggcttcccggatccagaaacctggtcacagcattcagcaacatggatgacatgctgcagaaagcgcatttggttatagaaggaacattcatctacctgagggacagcactgagtttttcattcgtgttagagatggctggaaaaaattacagctgggagaactgatccccattcctgccgacagccctccaccccctgcgctttccagcaacccacatcagcttctgcctccaccaaaccctatttcaagtgccaattatgagaagcctgctctgcatttggctgctctgaacatgccattttctggggacattcgagctgattttcagtgcttcaagcaggccagagctgcaggactgttgtccacctaccgagcattcttatcttcccatttgcaagatctgtccaccattgtgaggaaagcagagagatacagccttcccatagtgaacctcaagggccaagtactttttaataattgggactcaattttttctggccacggaggtcagttcaatatgcatattccaatatactcctttgatggtcgagacataatgacagatccttcttggccccagaaagtcatttggcatggctccagcccccatggcgtccgccttgtggataactactgtgaagcatggcgaaccgcggacacagcggtcacgggacttgcctccccgctgagcacggggaagattctggaccagaaagcatacagctgtgctaatcggctaattgtcctatgtatcgaaaacagtttcatgacagacgctaggaagtaatggccttctgatgattcttaaagagttttcaattttttcttatgtgaagagttgacactgaaatctaaaatgtttaattgttgtaaatattacagttttttttttttactacatattctttacaacagcaaccaaagaaaacatacctcaatacactcaaaactgaagacatagaggactcagatcaaagacaaaatctgatccatatattggtgctagattctgcaggaaaccccagcagtgtgaacgcatcccaacataggttaagagcaagttgaaaacaaaggccatggcattctgccactgcatccttcagacagttatatcctccttttaaaccattgttgttgagtgtaagatgtccttcatgttttcttataaagtcagtgtttagaaatgttaccctttctaagttatatacagatcaaatgcttttttctttcacgtacatccatcatttgcaactgctgttcgtacacagaaacaggactgctcaaatgatcctatttgtattttctgatgctatcagactctaatgtttttttccctaaaatattattgccatcatgctttaggaattttatatttttacacaatcatattttagtatggtgtctgtttatgtaactctgacttgctggaaaagttgaaactccaaataatctgaaactagaaaagaaatagcacataattactaccttccccttggcggctctcctccccaacccccaccccacaattttatgacttccatttggcaattgttgaattataactgcgactgaaacaaacaggttcatagagatgaattttctgagaaacatatatctacatgttgtataattggattttttttccatgtaagtgaacataaaaacatcttttccgggtgctttcttc

SEQ ID NO: 159 - DNA, 5411 bp, Homo sapiens
gtgtcccatagtgtttccaaacttggaaagggcgggggagggcgggaggatgcggagggcggaggtatgcagacaacgagtcagagtttccccttgaaagcctcaaaagtgtccacgtcctcaaaaagaatggaaccaatttaagaagccagccccgtggccacgtcccttcccccattcgctccctcctctgcgcccccgcaggctcctcccagctgtggctgcccgggcccccagccccagccctcccattggtggaggcccttttggaggcaccctagggccagggaaacttttgccgtataaatagggcagatccgggctttattattttagcaccacggcagcaggaggtttcggctaagttggaggtactggccacgactgcatgcccgcgcccgccaggtgatacctccgccggtgacccaggggctctgcgacacaaggagtctgcatgtctaagtgctagacatgctcagctttgtggatacgcggactttgttgctgcttgcagtaaccttatgcctagcaacatgccaatctttacaagaggaaactgtaagaaagggcccagccggagatagaggaccacgtggagaaaggggtccaccaggccccccaggcagagatggtgaagatggtcccacaggccctcctggtccacctggtcctcctggcccccctggtctcggtgggaactttgctgctcagtatgatggaaaaggagttggacttggccctggaccaatgggcttaatgggacctagaggcccacctggtgcagctggagccccaggccctcaaggtttccaaggacctgctggtgagcctggtgaacctggtcaaactggtcctgcaggtgctcgtggtccagctggccctcctggcaaggctggtgaagatggtcaccctggaaaacccggacgacctggtgagagaggagttgttggaccacagggtgctcgtggtttccctggaactcctggacttcctggcttcaaaggcattaggggacacaatggtctggatggattgaagggacagcccggtgctcctggtgtgaagggtgaacctggtgcccctggtgaaaatggaactccaggtcaaacaggagcccgtgggcttcctggtgagagaggacgtgttggtgcccctggcccagctggtgcccgtggcagtgatggaagtgtgggtcccgtgggtcctgctggtcccattgggtctgctggccctccaggcttcccaggtgcccctggccccaagggtgaaattggagctgttggtaacgctggtcctgctggtcccgccggtccccgtggtgaagtgggtcttccaggcctctccggccccgttggacctcctggtaatcctggagcaaacggccttactggtgccaagggtgctgctggccttcccggcgttgctggggctcccggcctccctggaccccgcggtattcctggccctgttggtgctgccggtgctactggtgccagaggacttgttggtgagcctggtccagctggctccaaaggagagagcggtaacaagggtgagcccggctctgctgggccccaaggtcctcctggtcccagtggtgaagaaggaaagagaggccctaatggggaagctggatctgccggccctccaggacctcctgggctgagaggtagtcctggttctcgtggtcttcctggagctgatggcagagctggcgtcatgggccctcctggtagtcgtggtgcaagtggccctgctggagtccgaggacctaatggagatgctggtcgccctggggagcctggtctcatgggacccagaggtcttcctggttcccctggaaatatcggccccgctggaaaagaaggtcctgtcggcctccctggcatcgacggcaggcctggcccaattggcccagctggagcaagaggagagcctggcaacattggattccctggacccaaaggccccactggtgatcctggcaaaaacggtgataaaggtcatgctggtcttgctggtgctcggggtgctccaggtcctgatggaaacaatggtgctcagggacctcctggaccacagggtgttcaaggtggaaaaggtgaacagggtccccctggtcctccaggcttccagggtctgcctggcccctcaggtcccgctggtgaagttggcaaaccaggagaaaggggtctccatggtgagtttggtctccctggtcctgctggtccaagaggggaacgcggtcccccaggtgagagtggtgctgccggtcctactggtcctattggaagccgaggtccttctggacccccagggcctgatggaaacaagggtgaacctggtgtggttggtgctgtgggcactgctggtccatctggtcctagtggactcccaggagagaggggtgctgctggcatacctggaggcaagggagaaaagggtgaacctggtctcagaggtgaaattggtaaccctggcagagatggtgctcgtggtgctcctggtgctgtaggtgcccctggtcctgctggagccacaggtgaccggggcgaagctggggctgctggtcctgctggtcctgctggtcctcggggaagccctggtgaacgtggtgaggtcggtcctgctggccccaatggatttgctggtcctgctggtgctgctggtcaacctggtgctaaaggagaaagaggagccaaagggcctaagggtgaaaacggtgttgttggtcccacaggccccgttggagctgctggcccagctggtccaaatggtccccccggtcctgctggaagtcgtggtgatggaggcccccctggtatgactggtttccctggtgctgctggacggactggtcccccaggaccctctggtatttctggccctcctggtccccctggtcctgctgggaaagaagggcttcgtggtcctcgtggtgaccaaggtccagttggccgaactggagaagtaggtgcagttggtccccctggcttcgctggtgagaagggtccctctggagaggctggtactgctggacctcctggcactccaggtcctcagggtcttcttggtgctcctggtattctgggtctccctggctcgagaggtgaacgtggtctaccaggtgttgctggtgctgtgggtgaacctggtcctcttggcattgccggccctcctggggcccgtggtcctcctggtgctgtgggtagtcctggagtcaacggtgctcctggtgaagctggtcgtgatggcaaccctgggaacgatggtcccccaggtcgcgatggtcaacccggacacaagggagagcgcggttaccctggcaatattggtcccgttggtgctgcaggtgcacctggtcctcatggccccgtgggtcctgctggcaaacatggaaaccgtggtgaaactggtccttctggtcctgttggtcctgctggtgctgttggcccaagaggtcctagtggcccacaaggcattcgtggcgataagggagagcccggtgaaaaggggcccagaggtcttcctggcttaaagggacacaatggattgcaaggtctgcctggtatcgctggtcaccatggtgatcaaggtgctcctggctccgtgggtcctgctggtcctaggggccctgctggtccttctggccctgctggaaaagatggtcgcactggacatcctggtacagttggacctgctggcattcgaggccctcagggtcaccaaggccctgctggcccccctggtccccctggccctcctggacctccaggtgtaagcggtggtggttatgactttggttacgatggagacttctacagggctgaccagcctcgctcagcaccttctctcagacccaaggactatgaagttgatgctactctgaagtctctcaacaaccagattgagacccttcttactcctgaaggctctagaaagaacccagctcgcacatgccgtgacttgagactcagccacccagagtggagcagtggttactactggattgaccctaaccaaggatgcactatggatgctatcaaagtatactgtgatttctctactggcgaaacctgtatccgggcccaacctgaaaacatcccagccaagaactggtataggagctccaaggacaagaaacacgtctggctaggagaaactatcaatgctggcagccagtttgaatataatgtagaaggagtgacttccaaggaaatggctacccaacttgccttcatgcgcctgctggccaactatgcctctcagaacatcacctaccactgcaagaacagcattgcatacatggatgaggagactggcaacctgaaaaaggctgtcattctacagggctctaatgatgttgaacttgttgctgagggcaacagcaggttcacttacactgttcttgtagatggctgctctaaaaagacaaatgaatggggaaagacaatcattgaatacaaaacaaataagccatcacgcctgcccttccttgatattgcacctttggacatcggtggtgctgaccaggaattctttgtggacattggcccagtctgtttcaaataaatgaactcaatctaaattaaaaaagaaagaaatttgaaaaaactttctctttgccatttcttcttcttcttttttaactgaaagctgaatccttccatttcttctgcacatctacttgcttaaattgtgggcaaaagagaaaaagaaggattgatcagagcattgtgcaatacagtttcattaactccttcccccgctcccccaaaaatttgaatttttttttcaacactcttacacctgttatggaaaatgtcaacctttgtaagaaaaccaaaataaaaattgaaaaataaaaaccataaacatttgcaccacttgtggcttttgaatatcttccacagagggaagtttaaaacccaaacttccaaaggtttaaactacctcaaaacactttcccatgagtgtgatccacattgttaggtgctgacctagacagagatgaactgaggtccttgttttgttttgttcataatacaaaggtgctaattaatagtatttcagatacttgaagaatgttgatggtgctagaagaatttgagaagaaatactcctgtattgagttgtatcgtgtggtgtattttttaaaaaatttgatttagcattcatattttccatcttattcccaattaaaagtatgcagattatttgcccaaatcttcttcagattcagcatttgttctttgccagtctcattttcatcttcttccatggttccacagaagctttgtttcttgggcaagcagaaaaattaaattgtacctattttgtatatgtgagatgtttaaataaattgtgaaaaaaatgaaataaagcatgtttggttttccaaaagaacatat

SEQ ID NO: 160 - DNA, 5490 bp, Homo sapiens
ggctgagttttatgacgggcccggtgctgaagggcagggaacaacttgatggtgctactttgaactgcttttcttttctcctttttgcacaaagagtctcatgtctgatatttagacatgatgagctttgtgcaaaaggggagctggctacttctcgctctgcttcatcccactattattttggcacaacaggaagctgttgaaggaggatgttcccatcttggtcagtcctatgcggatagagatgtctggaagccagaaccatgccaaatatgtgtctgtgactcaggatccgttctctgcgatgacataatatgtgacgatcaagaattagactgccccaacccagaaattccatttggagaatgttgtgcagtttgcccacagcctccaactgctcctactcgccctcctaatggtcaaggacctcaaggccccaagggagatccaggccctcctggtattcctgggagaaatggtgaccctggtattccaggacaaccagggtcccctggttctcctggcccccctggaatctgtgaatcatgccctactggtcctcagaactattctccccagtatgattcatatgatgtcaagtctggagtagcagtaggaggactcgcaggctatcctggaccagctggccccccaggccctcccggtccccctggtacatctggtcatcctggttcccctggatctccaggataccaaggaccccctggtgaacctgggcaagctggtccttcaggccctccaggacctcctggtgctataggtccatctggtcctgctggaaaagatggagaatcaggtagacccggacgacctggagagcgaggattgcctggacctccaggtatcaaaggtccagctgggatacctggattccctggtatgaaaggacacagaggcttcgatggacgaaatggagaaaagggtgaaacaggtgctcctggattaaagggtgaaaatggtcttccaggcgaaaatggagctcctggacccatgggtccaagaggggctcctggtgagcgaggacggccaggacttcctggggctgcaggtgctcggggtaatgacggtgctcgaggcagtgatggtcaaccaggccctcctggtcctcctggaactgccggattccctggatcccctggtgctaagggtgaagttggacctgcagggtctcctggttcaaatggtgcccctggacaaagaggagaacctggacctcagggacacgctggtgctcaaggtcctcctggccctcctgggattaatggtagtcctggtggtaaaggcgaaatgggtcccgctggcattcctggagctcctggactgatgggagcccggggtcctccaggaccagccggtgctaatggtgctcctggactgcgaggtggtgcaggtgagcctggtaagaatggtgccaaaggagagcccggaccacgtggtgaacgcggtgaggctggtattccaggtgttccaggagctaaaggcgaagatggcaaggatggatcacctggagaacctggtgcaaatgggcttccaggagctgcaggagaaaggggtgcccctgggttccgaggacctgctggaccaaatggcatcccaggagaaaagggtcctgctggagagcgtggtgctccaggccctgcagggcccagaggagctgctggagaacctggcagagatggcgtccctggaggtccaggaatgaggggcatgcccggaagtccaggaggaccaggaagtgatgggaaaccagggcctcccggaagtcaaggagaaagtggtcgaccaggtcctcctgggccatctggtccccgaggtcagcctggtgtcatgggcttccccggtcctaaaggaaatgatggtgctcctggtaagaatggagaacgaggtggccctggaggacctggccctcagggtcctcctggaaagaatggtgaaactggacctcagggacccccagggcctactgggcctggtggtgacaaaggagacacaggaccccctggtccacaaggattacaaggcttgcctggtacaggtggtcctccaggagaaaatggaaaacctggggaaccaggtccaaagggtgatgccggtgcacctggagctccaggaggcaagggtgatgctggtgcccctggtgaacgtggacctcctggattggcaggggccccaggacttagaggtggagctggtccccctggtcccgaaggaggaaagggtgctgctggtcctcctgggccacctggtgctgctggtactcctggtctgcaaggaatgcctggagaaagaggaggtcttggaagtcctggtccaaagggtgacaagggtgaaccaggcggtccaggtgctgatggtgtcccagggaaagatggcccaaggggtcctactggtcctattggtcctcctggcccagctggccagcctggagataagggtgaaggtggtgcccccggacttccaggtatagctggacctcgtggtagccctggtgagagaggtgaaactggccctccaggacctgctggtttccctggtgctcctggacagaatggtgaacctggtggtaaaggagaaagaggggctccgggtgagaaaggtgaaggaggccctcctggagttgcaggaccccctggaggttctggacctgctggtcctcctggtccccaaggtgtcaaaggtgaacgtggcagtcctggtggacctggtgctgctggcttccctggtgctcgtggtcttcctggtcctcctggtagtaatggtaacccaggacccccaggtcccagcggttctccaggcaaggatgggcccccaggtcctgcgggtaacactggtgctcctggcagccctggagtgtctggaccaaaaggtgatgctggccaaccaggagagaagggatcgcctggtgcccagggcccaccaggagctccaggcccacttgggattgctgggatcactggagcacggggtcttgcaggaccaccaggcatgccaggtcctaggggaagccctggccctcagggtgtcaagggtgaaagtgggaaaccaggagctaacggtctcagtggagaacgtggtccccctggaccccagggtcttcctggtctggctggtacagctggtgaacctggaagagatggaaaccctggatcagatggtcttccaggccgagatggatctcctggtggcaagggtgatcgtggtgaaaatggctctcctggtgcccctggcgctcctggtcatccaggcccacctggtcctgtcggtccagctggaaagagtggtgacagaggagaaagtggccctgctggccctgctggtgctcccggtcctgctggttcccgaggtgctcctggtcctcaaggcccacgtggtgacaaaggtgaaacaggtgaacgtggagctgctggcatcaaaggacatcgaggattccctggtaatccaggtgccccaggttctccaggccctgctggtcagcagggtgcaatcggcagtccaggacctgcaggccccagaggacctgttggacccagtggacctcctggcaaagatggaaccagtggacatccaggtcccattggaccaccagggcctcgaggtaacagaggtgaaagaggatctgagggctccccaggccacccagggcaaccaggccctcctggacctcctggtgcccctggtccttgctgtggtggtgttggagccgctgccattgctgggattggaggtgaaaaagctggcggttttgccccgtattatggagatgaaccaatggatttcaaaatcaacaccgatgagattatgacttcactcaagtctgttaatggacaaatagaaagcctcattagtcctgatggttctcgtaaaaaccccgctagaaactgcagagacctgaaattctgccatcctgaactcaagagtggagaatactgggttgaccctaaccaaggatgcaaattggatgctatcaaggtattctgtaatatggaaactggggaaacatgcataagtgccaatcctttgaatgttccacggaaacactggtggacagattctagtgctgagaagaaacacgtttggtttggagagtccatggatggtggttttcagtttagctacggcaatcctgaacttcctgaagatgtccttgatgtgcagctggcattccttcgacttctctccagccgagcttcccagaacatcacatatcactgcaaaaatagcattgcatacatggatcaggccagtggaaatgtaaagaaggccctgaagctgatggggtcaaatgaaggtgaattcaaggctgaaggaaatagcaaattcacctacacagttctggaggatggttgcacgaaacacactggggaatggagcaaaacagtctttgaatatcgaacacgcaaggctgtgagactacctattgtagatattgcaccctatgacattggtggtcctgatcaagaatttggtgtggacgttggccctgtttgctttttataaaccaaactctatctgaaatcccaacaaaaaaaatttaactccatatgtgttcctcttgttctaatcttgtcaaccagtgcaagtgaccgacaaaattccagttatttatttccaaaatgtttggaaacagtataatttgacaaagaaaaatgatacttctctttttttgctgttccaccaaatacaattcaaatgctttttgttttatttttttaccaattccaatttcaaaatgtctcaatggtgctataataaataaacttcaacactctttatgataacaacactgtgttatattctttgaatcctagcccatctgcagagcaatgactgtgctcaccagtaaaagataacctttctttctgaaatagtcaaatacgaaattagaaaagccctccctattttaactacctcaactggtcagaaacacagattgtattctatgagtcccagaagatgaaaaaaattttatacgttgataaaacttataaatttcattgattaatctcctggaagattggtttaaaaagaaaagtgtaatgcaagaatttaaagaaatatttttaaagccacaattattttaatattggatatcaactgcttgtaaaggtgctcctcttttttcttgtcattgctggtcaagattactaatatttgggaaggctttaaagacgcatgttatggtgctaatgtactttcacttttaaactctagatcagaattgttgacttgcattcagaacataaatgcacaaaatctgtacatgtctcccatcagaaagattcattggcatgccacaggggattctcctccttcatcctgtaaaggtcaacaataaaaaccaaattatggggctgcttttgtcacactagcatagagaatgtgttgaaatttaactttgtaagcttgtatgtggttgttgatcttttttttccttacagacacccataataaaatatcatattaaaattc

SEQ ID NO: 161 - DNA, 6549 bp, Homo sapiens
gcttggagccgccgcacccgggacggtgcgtagcgctggaagtccggccttccgagagctagctgtccgccgcggcccccgcacgccgggcagccgtccctcgccgcctcgggcgcgccaccatggggccccggctcagcgtctggctgctgctgctgcccgccgcccttctgctccacgaggagcacagccgggccgctgcgaagggtggctgtgctggctctggctgtggcaaatgtgactgccatggagtgaagggacaaaagggtgaaagaggcctcccggggttacaaggtgtcattgggtttcctggaatgcaaggacctgaggggccacagggaccaccaggacaaaagggtgatactggagaaccaggactacctggaacaaaagggacaagaggacctccgggagcatctggctaccctggaaacccaggacttcccggaattcctggccaagacggcccgccaggccccccaggtattccaggatgcaatggcacaaagggggagagagggccgctcgggcctcctggcttgcctggtttcgctggaaatcccggaccaccaggcttaccagggatgaagggtgatccaggtgagatacttggccatgtgcccgggatgctgttgaaaggtgaaagaggatttcccggaatcccagggactccaggcccaccaggactgccagggcttcaaggtcctgttgggcctccaggatttaccggaccaccaggtcccccaggccctcccggccctccaggtgaaaagggacaaatgggcttaagttttcaaggaccaaaaggtgacaagggtgaccaaggggtcagtgggcctccaggagtaccaggacaagctcaagttcaagaaaaaggagacttcgccaccaagggagaaaagggccaaaaaggtgaacctggatttcaggggatgccaggggtcggagagaaaggtgaacccggaaaaccaggacccagaggcaaacccggaaaagatggtgacaaaggggaaaaagggagtcccggttttcctggtgaacccgggtacccaggactcataggccgccagggcccgcagggagaaaagggtgaagcaggtcctcctggcccacctggaattgttataggcacaggacctttgggagaaaaaggagagaggggctaccctggaactccggggccaagaggagagccaggcccaaaaggtttcccaggactaccaggccaacccggacctccaggcctccctgtacctgggcaggctggtgcccctggcttccctggtgaaagaggagaaaaaggtgaccgaggatttcctggtacatctctgccaggaccaagtggaagagatgggctcccgggtcctcctggttcccctgggccccctgggcagcctggctacacaaatggaattgtggaatgtcagcccggacctccaggtgaccagggtcctcctggaattccagggcagccaggatttataggcgaaattggagagaaaggtcaaaaaggagagagttgcctcatctgtgatatagacggatatcgggggcctcccgggccacagggacccccgggagaaataggtttcccagggcagccaggggccaagggcgacagaggtttgcctggcagagatggtgttgcaggagtgccaggccctcaaggtacaccagggctgataggccagccaggagccaagggggagcctggtgagttttatttcgacttgcggctcaaaggtgacaaaggagacccaggctttccaggacagcccggcatgacagggagagcgggttctcctggaagagatggccatccgggtcttcctggccccaagggctcgccgggttctgtaggattgaaaggagagcgtggcccccctggaggagttggattcccaggcagtcgtggtgacaccggcccccctgggcctccaggatatggtcctgctggtcccattggtgacaaaggacaagcaggctttcctggaggccctggatccccaggcctgccaggtccaaagggtgaaccaggaaaaattgttcctttaccaggcccccctggagcagaaggactgccggggtccccaggcttcccaggtccccaaggagaccgaggctttcccggaaccccaggaaggccaggcctgccaggagagaagggcgctgtgggccagccaggcattggatttccagggccccccggccccaaaggtgttgacggcttacctggagacatggggccaccggggactccaggtcgcccgggatttaatggcttacctgggaacccaggtgtgcagggccagaagggagagcctggagttggtctaccgggactcaaaggtttgccaggtcttcccggcattcctggcacacccggggagaaggggagcattggggtaccaggcgttcctggagaacatggagcgatcggaccccctgggcttcaggggatcagaggtgaaccgggacctcctggattgccaggctccgtggggtctccaggagttccaggaataggcccccctggagctaggggtccccctggaggacagggaccaccggggttgtcaggccctcctggaataaaaggagagaagggtttccccggattccctggactggacatgccgggccctaaaggagataaaggggctcaaggactccctggcataacgggacagtcggggctccctggccttcctggacagcagggggctcctgggattcctgggtttccaggttccaagggagaaatgggcgtcatggggacccccgggcagccgggctcaccaggaccagtgggtgctcctggattaccgggtgaaaaaggggaccatggctttccgggctcctcaggacccaggggagaccctggcttgaaaggtgataagggggatgtcggtctccctggcaagcctggctccatggataaggtggacatgggcagcatgaagggccagaaaggagaccaaggagagaaaggacaaattggaccaattggtgagaagggatcccgaggagaccctgggaccccaggagtgcctggaaaggacgggcaggcaggacagcctgggcagccaggacctaaaggtgatccaggtataagtggaaccccaggtgctccaggacttccgggaccaaaaggatctgttggtggaatgggcttgccaggaacacctggagagaaaggtgtgcctggcatccctggcccacaaggttcacctggcttacctggagacaaaggtgcaaaaggagagaaagggcaggcaggcccacctggcataggcatcccagggctgcgaggtgaaaagggagatcaagggatagcgggtttcccaggaagccctggagagaagggagaaaaaggaagcattgggatcccaggaatgccagggtccccaggccttaaagggtctcccgggagtgttggctatccaggaagtcctgggctacctggagaaaaaggtgacaaaggcctcccaggattggatggcatccctggtgtcaaaggagaagcaggtcttcctgggactcctggccccacaggcccagctggccagaaaggggagccaggcagtgatggaatcccggggtcagcaggagagaagggtgaaccaggtctaccaggaagaggattcccagggtttccaggggccaaaggagacaaaggttcaaagggtgaggtgggtttcccaggattagccgggagcccaggaattcctggatccaaaggagagcaaggattcatgggtcctccggggccccagggacagccggggttaccgggatccccaggccatgccacggaggggcccaaaggagaccgcggacctcagggccagcctggcctgccaggacttccgggacccatggggcctccagggcttcctgggattgatggagttaaaggtgacaaaggaaatccaggctggccaggagcacccggtgtcccagggcccaagggagaccctggattccagggcatgcctggtattggtggctctccaggaatcacaggctctaagggtgatatggggcctccaggagttccaggatttcaaggtccaaaaggtcttcctggcctccagggaattaaaggtgatcaaggcgatcaaggcgtcccgggagctaaaggtctcccgggtcctcctggccccccaggtccttacgacatcatcaaaggggagcccgggctccctggtcctgagggccccccagggctgaaagggcttcagggactgccaggcccgaaaggccagcaaggtgttacaggattggtgggtatacctggacctccaggtattcctgggtttgacggtgcccctggccagaaaggagagatgggacctgccgggcctactggtccaagaggatttccaggtccaccaggccccgatgggttgccaggatccatggggcccccaggcaccccatctgttgatcacggcttccttgtgaccaggcatagtcaaacaatagatgacccacagtgtccttctgggaccaaaattctttaccacgggtactctttgctctacgtgcaaggcaatgaacgggcccatggccaggacttgggcacggccggcagctgcctgcgcaagttcagcacaatgcccttcctgttctgcaatattaacaacgtgtgcaactttgcatcacgaaatgactactcgtactggctgtccacccctgagcccatgcccatgtcaatggcacccatcacgggggaaaacataagaccatttattagtaggtgtgctgtgtgtgaggcgcctgccatggtgatggccgtgcacagccagaccattcagatcccaccgtgccccagcgggtggtcctcgctgtggatcggctactcttttgtgatgcacaccagcgctggtgcagaaggctctggccaagccctggcgtcccccggctcctgcctggaggagtttagaagtgcgccattcatcgagtgtcacggccgtgggacctgcaattactacgcaaacgcttacagcttttggctcgccaccatagagaggagcgagatgttcaagaagcctacgccgtccaccttgaaggcaggggagctgcgcacgcacgtcagccgctgccaagtctgtatgagaagaacataatgaagcctgactcagctaatgtcacaacatggtgctacttcttcttctttttgttaacagcaacgaaccctagaaatatatcctgtgtacctcactgtccaatatgaaaaccgtaaagtgccttataggaatttgcgtaactaacacaccctgcttcattgacctctacttgctgaaggagaaaaagacagcgataagctttcaatagtggcataccaaatggcacttttgatgaaataaaatatcaatattttctgcaatccaatgcactgatgtgtgaagtgagaactccatcagaaaaccaaagggtgctaggaggtgtgggtgccttccatactgtttgcccattttcattcttgtattataattaattttctacccccagagataaatgtttgtttatatcactgtctagctgtttcaaaatttaggtcccttggtctgtacaaataatagcaatgtaaaaatggttttttgaacctccaaatggaattacagactcagtagccatatcttccaaccccccagtataaatttctgtctttctgctatgtgtggtactttgcagctgcttttgcagaaatcacaattttcctgtggaataaagatggtccaaaaatagtcaaaaattaaatatatatatatattagtaatttatatagatgtcagcaattaggcagatcaaggtttagtttaacttccactgttaaaataaagcttacatagttttcttcctttgaaagactgtgctgtcctttaacataggtttttaaagactaggatattgaatgtgaaacatccgttttcattgttcacttctaaaccaaaaattatgtgttgccaaaaccaaacccaggttcatgaatatggtgtctattatagtgaaacatgtactttgagcttattgtttttattctgtattaaatattttcagggttttaaacactaatcacaaactgaatgacttgacttcaaaagcaacaaccttaaaggccgtcatttcattagtattcctcattctgcatcctggcttgaaaaacagctctgttgaatcacagtatcagtattttcacacgtaagcacattcgggccatttccgtggtttctcatgagctgtgttcacagacctcagcagggcatcgcatggaccgcaggagggcagattcggaccactaggcctgaaatgacatttcactaaaagtctccaaaacatttctaagactactaaggccttttatgtaatttctttaaatgtgtatttcttaagaattcaaatttgtaataaaactatttgtataaaaattaagcttttattaatttgttgctagtattgccacagacgcattaaaagaaacttactgcacaagctgctaataaatttgtaagctttgcataccttaaaaaaaaaaaaaaaaaa

SEQ ID NO: 162 - DNA, 8439 bp, Homo sapiens
cgcactctccgtccccgcggctggcgcaggacctcactcgagcggagcgcccacggggagcgggtcgcggggcggcggcggcgaggaggaggcgagaaggagttggaggaggaggaggaggaggcgagggcgagctagcccagcggggtcccggccgccccgcgggccaaagtcgagccctcccgcccgtgggcgagcgcgccagccgccccttccagaacagccgccgccacaaagaagaacggggggtgccgaggtccccatgacctcctaaagtggtgcggtccctgctgagtgcgctgcccgggccgtgacccgcgcccctgtgcgtccccgcgcgcctccgagcgcccctgtgcgccccggcccgcgccccgccggcatggacgtccatacccgctggaaagcgcgcagcgcgctccgcccgggcgccccgctgctgcccccgctgctgctgctgctgctgtgggcgccgcctccgagccgcgcagctcagccagcagatctcctgaaggttctagattttcacaacttgcctgatggaataacaaagacaacaggcttttgcgccacgcggcgatcttccaaaggcccggatgtcgcttacagagtcaccaaagacgcgcagctcagcgcacccaccaagcagctgtaccctgcgtctgcatttcccgaggacttctccatcctaacaactgtgaaagccaagaaaggcagccaggccttcctggtctccatctacaacgagcagggtatccagcagattgggctggagctgggccgctctcccgtcttcctctacgaggaccacacggggaagcctggcccggaagactaccccctcttccggggcatcaacctgtcagatggcaagtggcacagaattgctctcagcgtccacaagaaaaatgtcaccttgatcctcgactgtaaaaagaagaccaccaaattcctcgaccgcagcgaccaccccatgatcgacatcaatggcatcatcgtgtttggcacccggatcctggatgaggaggtgtttgagggtgacatccagcagctgctctttgtctcggaccaccgggcagcttatgattactgtgagcactacagccctgactgtgacaccgcagtacctgacaccccacagtcgcaggaccccaatccagatgaatattacacggaaggagacggcgagggtgagacctattactacgaatacccctactacgaagaccccgaagacctagggaaggagcccacccccagcaagaagcccgtggaagctgccaaagaaaccacagaggtccccgaggagctgaccccgacccccacggaagctgctcccatgcctgaaaccagtgaaggggctgggaaggaagaggacgtcggcatcggggactatgactacgtgcccagtgaggactactacacgccctcaccgtatgatgacctcacctatggcgagggggaggagaaccccgaccagcccacagacccaggcgctggggccgaaattcccaccagcaccgccgacacctccaactcctccaatccagctccgcctccaggggaaggtgcggatgacttggagggggagttcactgaggaaacgatccggaaccttgacgagaactactacgacccctactacgaccccaccagctccccgtcggagatcgggccgggaatgccggcgaaccaggataccatctatgaagggattggaggacctcggggcgagaaaggccaaaagggagaaccagcgattatcgagccgggcatgctcatcgagggcccgcctggcccagaaggccccgcgggtcttcccggacctccaggaaccatgggtcccactggccaagtcggggaccctggagaaaggggcccccctggacgcccaggccttcctggggccgatggcctgcccggtcctccaggaaccatgctcatgctgcccttccggtttggaggtggcggcgatgcgggctccaaaggccccatggtctcagcccaggagtcccaggcgcaagccattctccagcaggccaggttggcactgaggggaccagctggcccgatgggtctcacagggagacctggccctgtgggtccccctgggagcggaggtttgaagggcgagccgggagacgtggggcctcagggtcctcgaggtgtgcaaggcccgcctggtccggccgggaagcccggaagacggggtcgggctgggagtgatggagccagaggaatgcctggacaaactggccccaagggtgaccggggtttcgacggcctggctgggttgccaggcgagaagggccacaggggtgaccctggtccttccggcccaccaggacctccgggagacgatggagaaaggggtgacgacggagaagttgggcccagggggctgcctggggagcccgggccacgtggtctgcttgggccgaaggggcccccaggtcctcccggacctcccggtgtcacgggtatggacggccagccggggccaaaaggaaatgtgggtccccagggagagcctggccccccaggacagcagggtaatccaggcgcccagggtcttccaggcccccagggtgcaattggtcctccaggagaaaagggtcccttggggaaaccaggccttccaggaatgcccggtgctgacggacccccgggacaccctggcaaagaaggccctccaggagagaaaggaggtcagggtccacctggcccccagggtccgattggctacccaggtcctcgaggagtcaagggggccgatggcatccgtggtctgaagggcacaaagggcgagaagggtgaagacggctttcctgggtttaaaggagacatgggcatcaagggtgatcggggggagatcggcccacccggtcccaggggagaagatggccctgaaggcccaaagggtcgcggaggtcccaatggtgaccccggtcctctgggaccccctggggagaagggaaaactcggagtcccagggttaccagggtatccaggaagacaaggaccaaagggctctattggattccctggatttcctggcgccaatggagagaagggcggcagggggacccctggaaagccaggaccgcgggggcagcgaggcccaacgggtccgaggggtgaaagaggcccccggggcatcactgggaagcctggccccaagggcaactccggaggtgacggcccagctggccctcctggtgaacggggacccaatggaccccaaggacccacaggatttcctggaccaaagggcccccctggccctccaggcaaggatggactcccaggacaccctggacagagaggcgagactggtttccaaggcaagaccggccctccaggcccccccggcgtggtcggccctcagggtcccacgggagaaacgggcccaatgggtgagcgtggccaccctgggccccctggaccccccggtgaacaggggcttccgggccttgctggaaaagaagggacgaagggtgacccaggccctgcaggcctccctgggaaagatggccctccaggattacgtggtttccctggggaccgagggcttcctggtccagtgggagctcttggactgaaaggcaatgaagggccccctggcccaccaggccctgcgggatctccaggggagagaggtccagctggagccgctgggcccatcggaattccagggagacctgggccccagggacccccagggccggcaggagagaaaggggctcctggcgagaaaggcccacaaggcccagctggccgagacggtctccaggggcctgtggggctcccgggtccagctggccctgtgggtccccctggagaagacggagataagggagagatcggggagccggggcagaaaggaagcaagggggacaaaggagaacagggtcctcctgggcctacaggtcctcaaggccccatcggacagccaggcccctctggagctgacggcgagccggggcctcggggccagcagggccttttcgggcagaaaggtgatgaaggtcccagaggctttcctggaccccctgggccagtggggctgcagggtttgccaggacctccaggcgagaagggtgagacaggagacgtgggccagatgggccccccgggtccccctggcccccgaggaccctccggagctccaggtgctgatggcccacaaggtcccccaggtggaataggaaaccctggtgcagtgggagagaagggcgagcctggcgaagcaggtgagcctggccttccgggagaaggcggccccccgggacccaaaggagaaaggggagagaagggcgagtcaggcccttcaggtgctgccggaccccctggacccaaaggccctcccggagatgatggtcccaaaggcagccctggcccagtgggttttcctggagatcctggcccccccggagagcctggccccgcgggtcaagatggtccccctggtgacaaaggagatgatggtgaacccgggcagacgggatcccccggccctactggtgaaccaggtccatcggggcctccaggaaaaaggggtcccccaggccccgcaggccccgaaggcagacagggagagaaaggggccaagggagaagccggcttggaaggccctcctgggaagactggccccatcggcccccagggggcccctgggaagcccggaccggatggccttcgagggatccctggccctgtgggagaacaaggtctcccaggatccccaggcccggacggtccccccggccccatgggtcccccaggacttcccggcctcaaaggagattctggtcccaaaggtgaaaagggtcatccaggcctgatcgggctcatcggtcctccgggtgaacagggtgagaagggcgaccgtggtctccctggcccccagggctcctccggtcctaagggagaacagggtatcactggtccttctggcccgattgggcctcctgggccccctggcctgccgggtccgcctggtccaaaaggtgctaagggctcctcgggtccaactggcccgaagggtgaggcaggccacccaggacccccaggccccccgggccccccgggagaggtcatccagcccctgccaatccaggcatccaggacgcggcggaacatcgacgccagccagctgctggacgacgggaatggcgagaactacgtggactacgcggacggcatggaagagatcttcggctctctcaactctctgaagctggagattgagcagatgaaacggcccctgggcacgcagcagaaccccgcccgcacctgcaaggacctgcagctctgccaccccgacttcccagatggtgaatactgggtcgatcctaaccaaggatgctccagggattccttcaaggtttactgcaacttcacagccggggggtcgacatgcgtcttccctgacaagaagtccgaaggggccagaatcacttcttggcccaaagaaaacccgggctcctggttcagtgaattcaagcgtgggaaactgctctcctatgtggacgccgagggcaaccctgtgggtgtggtacagatgaccttcctgcggctgctgagcgcctctgcccaccagaacgtcacctaccactgctaccagtcagtggcctggcaggacgcagccacgggcagctacgacaaggccctccgcttcctgggctccaacgacgaggagatgtcctatgacaacaacccctacatccgcgccctggtggacggctgtgctaccaagaaaggctaccagaagacggttctggagatcgacacccccaaagtggagcaggtgcccatcgtggacatcatgttcaatgacttcggtgaagcgtcacagaaatttggatttgaagtggggccggcttgcttcatgggctaggagccgccgagcccgggctcccgagagcaacctcgtgacctcagcatgccattcgttcgtgagtgtcccgtgcacgtcctgaccctggacagtgaaggcttctccctcccctcccacctgacttcatctacgcctcggcaccacggggtgtgggaccccagcccggagagaacagagggaaggagccgcgcccccacctggagctgaatcacatgacctagctgcaccccagcgcctgggcccgccccacgctctgtccacacccacgcgccccgggagcggggccatgcctccagccccccagctcgcccgacccatcctgttcgtgaataggtctcaggggttgggggagggactgccagatttggacactatatttttttctaaattcaacttgaagatgtgtatttcccctgaccttcaaaaaatgttccaaggtaagcctcgtaaaggtcatcccaccatcaccaaagcctccgtttttaacaacctccaacacgatccatttagaggccaaatgtcattctgcaggtgccttcccgatggattaaaggtgcttatgtttttgtgagttttaagtaaatatttgtattgtattgttataaatgttaagtgtgcctggctttcaatcatgcacggaaacccagtctcagtcccacggacagaatgggcgaggcatggattctgggttgcagtaccgttctgattagaaataggaagtctccccacccccgccctggccaagaacgtgcaataaattggaagtttgccccggggcagcaagaatttatgctgccattgaaaagcaggtaccagtgccccttttcagacagtttttgattcgctctagactttttttttttttaatagggaaaaaatttgataattttcttttttctacatgcacttaagactaaaacacaggtttggattaattttatttgcttcctttttccgcttttcttcccgcagagcctgatgggagaatgtccagggcagggaaaccacattttttgtaggtgataactcaatgaaaattggtgcttattttttacacttctctcttgtggctctcttgtggtgctatctatctgttttaaggtctccttgaaggcgcactggggaccctggccatgcctcgttctccctgctttctttatcctgttattgcctccacagtctgttgccaaggactctaagatcaatgcacgtcactttcctttccactgggcaggatagccaagcacactccctcctgcgctctcccgccccggtgcgtccactcccgagggctgttatgaggactgggttgtgcctacttgatttgaaaacacacacaagcaataaaaagcctcttcctgcattgtctgtggtgtgaccatagcagattatatttggttcctgaatgtttgtggtgctaatttctgtgtttgttccaagccgttcagtcatgccatgcgctgcctcggtagatggagtaatgtacaatgaactccatgagtctctccagggctgcctgcagcacgtcttttccaagtagcctatttggattcccatctcaaatgtcctggatgcgagcgtcagcggctccagagctcggggcgggtgaggtcccctttggggaaccctttcctggccatcgaggtcggggggctgccgtctgtgggcaggaggacccgaggggcagccaggaaaggcgatctcttcactgtgaaaagttgcccgggtgcagcgccttttccttctaccatgggaaatgcaggctgggcccttggggtgagcctgcggggctctggtgctgtccccgacccccaccaccaccagaatgcagttccagcttaggaagccacaaacaagccacccaggaggaacaaaacaccgccagcgtggattttccaaatttccctggaaagtaagtctcgctcttgccaaagaaaagtctggcttggagagtctctggagcccaggatgccagcatgtgccaatgactgtcaccttcatctcttcaaaagaaaagccatagccgaggactgtcccgcgacccccgtggactgcgtctaggtcatgtgattctgttttcatttctcatcccatccaatttgtccttttctcctgtcattttcttcctctgtggtcccttcaaagttgttataatttgtactgaacttcaaaatgtgtcccgttctccccagaccactctagccacagtatattgcaataaaattacttcttatatttgcagaaattcttttggtgtaattttattttttcctctcaatatatataattggacaaacgctggcaaaaagaaaaaaatggtaagcaaaaaacccaagataaagtttcgaggacatcaggccttttgaaatacaatgtcaaatgacacattgtacggtttcaaaaaatccgctagacatgtcataagttttaactgtaatgcccaggaaaggatatcttaaaatattctaaacttgtgtaacaaaggaataattaactgtaatagtttttcaataaatcgagttgggtgtttccaccgtaaa

SEQ ID NO: 163 - DNA, 6930 bp, Homo sapiens
gaccgttgcttggcagacactggatggttatgagcctgaacaagctgaaaaggggcaggaaaagaagtggaggcagcattcttcctatttaaagctgcatcgcttgaaaaaagttttcgcagactgtgctggagctggtgctgaaaaagggggtttgcagaggctgccctggggctggtgctgaaagaagagcccacagctgacttcatggtgctacaataacctcagaatctacttttcactctcaggagaacccacatgtctaatatttagacatgatggcaaactgggcggaagcaagacctctcctcattcttattgttttattagggcaatttgtctcaataaaagcccaggaagaagacgaggatgaaggatatggtgaagaaatagcctgcactcagaatggccagatgtacttaaacagggacatttggaaacctgccccttgtcagatctgtgtctgtgacaatggagccattctctgtgacaagatagaatgccaggatgtgctggactgtgccgaccctgtaacgccccctggggaatgctgtcctgtctgttcacaaacacctggaggtggcaatacaaattttggtagaggaagaaagggacaaaagggagaaccaggattagtgcctgttgtaacaggcatacgtggtcgtccaggaccggcaggacctccaggatcacagggaccaagaggagagcgagggccaaaaggaagacctggccctcgtggacctcagggaattgatggagaaccaggtgttcctggtcaacctggtgctccaggacctcctggacatccgtcccacccaggacccgatggcttgagcaggccgttttcagctcaaatggctgggttggatgaaaaatctggacttgggagtcaagtaggactaatgcctggctctgtgggtcctgttggcccaaggggaccacagggtttacaaggacagcaaggtggtgcaggacctacaggacctcctggtgaacctggtgatcctggaccaatgggtccgattggttcacgtggaccagagggccctcctggtaaacctggggaagatggtgaacctggcagaaatggaaatcctggtgaagtgggatttgcaggatctccgggagctcgtggatttcctggggctcctggtcttccaggtctgaagggtcaccgaggacacaaaggtcttgaaggccctaaaggtgaagttggagcacctggttccaagggtgaagctggccccactggtccaatgggtgccatgggtcctctgggtccgaggggaatgccaggagagagagggagacttgggccacagggtgctcctggacaacgaggtgcacatggtatgcctggaaaacctggaccaatgggtcctcttgggataccaggctcttctggttttccaggaaatcctggaatgaagggagaagcaggtcctacaggggcgcgaggccctgaaggtcctcaggggcagagaggtgaaactgggcccccaggtccagttggctctccaggtcttcctggtgcaataggaactgatggtactcctggtgccaaaggcccaacgggctctccgggtacctctggtcctcctggctcagcagggcctcctggatctccaggacctcagggtagcactggtcctcagggaattcgaggccaaccgggtgatccaggagttccaggtttcaaaggagaagctggcccaaaaggggaaccagggccacatggtattcagggtccgataggcccacccggtgaagaaggcaaaagaggtcccagaggtgacccaggaacagttggtcctccagggccagtgggagaaaggggtgctcctggcaatcgtggttttccaggctctgatggtttacctgggccaaagggtgctcaaggagaacggggtcctgtaggttcttcaggacccaaaggaagccagggggatccaggacgtccaggggaacctgggcttccaggtgctcggggtttgacaggaaatcctggtgttcaaggtcctgaaggaaaacttggacctttgggtgcgccaggggaagatggccgtccaggtcctccaggctccataggaatcagagggcagcccgggagcatgggccttccaggccccaaaggtagcagtggtgaccctgggaaacctggagaagcaggaaatgctggagttcctgggcagaggggagctcctggaaaagatggtgaagttggtccttctggtcctgtgggcccgccgggtctagctggtgaaagaggagaacaaggacctccaggccccacaggttttcaggggcttcctggtcctccagggcctcctggagaaggtggaaaaccaggtgatcaaggtgttcctggagatcccggagcagttggcccgttaggacctagaggagaacgaggaaatcctggggaaagaggagaacctgggataactggactccctggtgagaagggaatggctggaggacatggtcctgatggcccaaaaggcagtccaggtccatctgggacccctggagatacaggcccaccaggtcttcaaggtatgccgggagaaagaggaattgcaggaactcctggccccaagggtgacagaggtggcataggagaaaaaggtgctgaaggcacagctggaaatgatggtgcaagaggtcttccaggtcctttgggccctccaggtccggcaggtcctactggagaaaagggtgaacctggtcctcgaggtttagttggccctcctggctcccggggcaatcctggttctcgaggtgaaaatgggccaactggagctgttggttttgccggaccccagggtcctgacggacagcctggagtaaaaggtgaacctggagagccaggacagaagggagatgctggttctcctggaccacaaggtttagcaggatcccctggccctcatggtcctaatggtgttcctggactaaaaggtggtcgaggaacccaaggtccgcctggtgctacaggatttcctggttctgcgggcagagttggacctccaggccctgctggagctccaggacctgcgggacccctaggggaacccgggaaggagggacctccaggtcttcgtggggaccctggctctcatgggcgtgtgggagatcgaggaccagctggcccccctggtggcccaggagacaaaggggacccaggagaagatgggcaacctggtccagatggcccccctggtccagctggaacgaccgggcagagaggaattgttggcatgcctgggcaacgtggagagagaggcatgcccggcctaccaggcccagcgggaacaccaggaaaagtaggaccaactggtgcaacaggagataaaggtccacctggacctgtggggcccccaggctccaatggtcctgtaggggaacctggaccagaaggtccagctggcaatgatggtaccccaggacgggatggtgctgttggagaacgtggtgatcgtggagaccctgggcctgcaggtctgccaggctctcagggtgcccctggaactcctggccctgtgggtgctccaggagatgcaggacaaagaggagatccgggttctcggggtcctataggaccacctggtcgagctgggaaacgtggattacctggaccccaaggacctcgtggtgacaaaggtgatcatggagaccgaggcgacagaggtcagaagggccacagaggctttactggtcttcagggtcttcctggccctcctggtccaaatggtgaacaaggaagtgctggaatccctggaccatttggcccaagaggtcctccaggcccagttggtccttcaggtaaagaaggaaaccctgggccacttgggccaattggacctccaggtgtacgaggcagtgtaggagaagcaggacctgagggccctcctggtgagcctggcccacctggccctccgggtccccctggccaccttacagctgctcttggggatatcatggggcactatgatgaaagcatgccagatccacttcctgagtttactgaagatcaggcggctcctgatgacaaaaacaaaacggacccaggggttcatgctaccctgaagtcactcagtagtcagattgaaaccatgcgcagccccgatggctcgaaaaagcacccagcccgcacgtgtgatgacctaaagctttgccattccgcaaagcagagtggtgaatactggattgatcctaaccaaggatctgttgaagatgcaatcaaagtttactgcaacatggaaacaggagaaacatgtatttcagcaaacccatccagtgtaccacgtaaaacctggtgggccagtaaatctcctgacaataaacctgtttggtatggtcttgatatgaacagagggtctcagttcgcttatggagaccaccaatcacctaatacagccattactcagatgacttttttgcgccttttatcaaaagaagcctcccagaacatcacttacatctgtaaaaacagtgtaggatacatggacgatcaagctaagaacctcaaaaaagctgtggttctcaaaggggcaaatgacttagatatcaaagcagagggaaatattagattccggtatatcgttcttcaagacacttgctctaagcggaatggaaatgtgggcaagactgtctttgaatatagaacacagaatgtggcacgcttgcccatcatagatcttgctcctgtggatgttggcggcacagaccaggaattcggcgttgaaattgggccagtttgttttgtgtaaagtaagccaagacacatcgacaatgagcaccaccatcaatgaccaccgccattcacaagaactttgactgtttgaagttgatcctgagactcttgaagtaatggctgatcctgcatcagcattgtatatatggtcttaagtgcctggcctccttatccttcagaatatttattttacttacaatcctcaagttttaattgattttaaatatttttcaatacaacagtttaggtttaagatgaccaatgacaatgaccacctttgcagaaagtaaactgattgaataaataaatctccgttttcttcaatttatttcagtgtaatgaaaaagttgcttagtatttatgaggaaattcttcttcctggcaggtagcttaaagagtggggtatatagagccacaacacatgtttattttgcttggctgcagttgaaaaatagaaattagtgcccttttgtgacctctcattccaagattgtcaattaaaaatgagtttaaaatgtttaacttgtgatcgagacctacatgcatgtcttgatattgtgtaactataatagagactctttaaggagaatcttaaaaaaaaaaaaacgtttctcactgtcttaaatagaatttttaaatagtatatattcagtggcattttggagaacaaagtgaatttacttcgacttcttaaatttttgtaaaagactataagtttagacatctttctcattcaaatttaaagatatctttctcctcttgatcaatctatcaatattgatagaagtcacactagtatataccatttaatacatttacactttcttatttaagaagatattgaatgcaaaataattgacatatagaactttacaaacatatgtccaaggactctaaattgagactcttccacatgtacaatctcatcatcctgaagcctataatgaagaaaaagatctagaaactgagttgtggagctgactctaatcaaatgtgatgattggaattagaccatttggcctttgaactttcataggaaaaatgacccaacatttcttagcatgagctacctcatctctagaagctgggatggacttactattcttgtttatattttagatactgaaaggtgctatgcttctgttattattccaagactggagataggcagggctaaaaaggtattattatttttcctttaatgatggtgctaaaattcttcctataaaattccttaaaaataaagatggtttaatcactaccattgtgaaaacataactgttagacttcccgtttctgaaagaaagagcatcgttccaatgcttgttcactgttcctctgtcatactgtatctggaatgctttgtaatacttgcatgcttcttagaccagaacatgtaggtccccttgtgtctcaatactttttttttcttaattgcatttgttggctctattttaatttttttcttttaaaataaacagctgggaccatcccaaaagacaagccatgcatacaactttggtcatgtatctctgcaaagcatcaaattaaatgcacgcttttgtcatgtcagtggtttttgttttgtgaaattcctttgaccatattagatctatttcatttccaatagtgaaaaggagatgtggtggtatactttgtttgccatttgtttaaaagatacaacggataccttctatcatgtatgtactggcttataaatgaaaatctatctacaacattacccacaaaggcaacatgacaccaattatcactgcctctgcccttaaaaatgtcagagtagtattattgataaaaagggcaagcaatagatttttcatgactgaataaactgtaataataaaacatatgtctcaaagtgtatcacatatgaatttagcctaattgttttcagtttcattctcaatatttagtttacaacatcattttcccctaaactggttatattttgacctgtatatcttaaatttgagtatttatatgcctaaatacatgtgtgagttttgtttgacttccaagtccaaactataagattatataagttcatatagatgaatcagaaatatgtggtaatactattaagtcacaaacactaacaatttccaactatagaaataacagttcttatttggattttgggaatgctaccaata

SEQ ID NO: 164 - DNA, 3455 bp, Homo sapiens
gcttactcggcgcccgcgcctcgggccgtcgggagcggagcctcctcgggaccaggacttcagggccacaggtgctgccaagatgctccagggcacctgctccgtgctcctgctctggggaatcctgggggccatccaggcccagcagcaggaggtcatctcgccggacactaccgagagaaacaacaactgcccagagaagaccgactgccccatccacgtgtacttcgtgctggacacctcggagagcgtcaccatgcagtcccccacggacatcctgctcttccacatgaagcagttcgtgccgcagttcatcagccagctgcagaacgagttctacctggaccaggtggcgctgagctggcgctacggcggcctgcacttctctgaccaggtggaggtgttcagcccaccgggcagcgaccgggcctccttcatcaagaacctgcagggcatcagctccttccgccgcggcaccttcaccgactgcgcgctggccaacatgacggagcagatccggcaggaccgcagcaagggcaccgtccacttcgccgtggtcatcaccgacggccacgtcaccggcagcccctgcgggggcatcaagctgcaggccgagcgggcccgcgaggagggcatccggctcttcgccgtggcccccaaccagaacctgaaggagcagggcctgcgggacatcgccagcacgccgcacgagctctaccgcaacgactacgccaccatgctgcccgactccaccgagatcgaccaggacaccatcaaccgcatcatcaaggtcatgaaacacgaagcctacggagagtgctacaaggtgagctgcctggaaatccctgggccctctggccccaagggctaccgtggacagaagggtgccaagggcaacatgggtgagccgggagagcctggccagaagggaagacagggagacccgggcatcgaaggccccattggattcccaggacccaagggcgttcctggcttcaaaggagagaagggtgaatttggagccgacggtcgcaagggggcccctggcctggctggcaagaacgggaccgatggacagaagggcaagctggggcgcatcggacctcctggctgcaagggagaccctggaaaccggggccccgacggttacccgggggaagcagggagtccaggggagcgaggagaccaaggcggcaagggggaccctggccgcccaggacgcagagggcccccgggagaaatcggggccaagggaagcaaggggtatcaaggcaacagtggagccccaggaagtcctggtgtgaaaggagccaagggcgggcctgggccccgcggacccaaaggcgagccggggcgcaggggagaccccggcaccaagggcagcccaggcagcgatggccccaagggggagaagggggaccctggccctgaggggccccgcggcctggctggagaggttggcaacaaaggagccaagggagaccgaggcttgcctggacccagaggcccccagggagctcttggggagcccggaaagcagggatctcggggagaccccggtgatgcaggaccccgtggagactcaggacagccaggccccaagggagaccccggcaggcctggattcagctacccaggaccccgaggagcacccggagaaaaaggcgagcccggcccacgcggccccgagggaggccgaggcgactttggcttgaaaggagaacctgggaggaaaggagagaaaggagagcctgcggatcctggtccccctggtgagccaggccctcgggggccaagaggagtcccaggacccgagggtgagcccggcccccctggagaccccggtctcacggagtgtgacgtcatgacctacgtgagggagacctgcgggtgctgcgactgtgagaagcgctgtggcgccctggacgtggtcttcgtcatcgacagctccgagagcattgggtacaccaacttcacactggagaagaacttcgtcatcaacgtggtcaacaggctgggtgccatcgctaaggaccccaagtccgagacagggacgcgtgtgggcgtggtgcagtacagccacgagggcacctttgaggccatccagctggacgacgaacgtatcgactccctgtcgagcttcaaggaggctgtcaagaacctcgagtggattgcgggcggcacctggacaccctcagccctcaagtttgcctacgaccgcctcatcaaggagagccggcgccagaagacacgtgtgtttgcggtggtcatcacggacgggcgccacgaccctcgggacgatgacctcaacttgcgggcgctgtgcgaccgcgacgtcacagtgacggccatcggcatcggggacatgttccacgagaagcacgagagtgaaaacctctactccatcgcctgcgacaagccacagcaggtgcgcaacatgacgctgttctccgacctggtcgctgagaagttcatcgatgacatggaggacgtcctctgcccggaccctcagatcgtgtgcccagaccttccctgccaaacagagctgtccgtggcacagtgcacgcagcggcccgtggacatcgtcttcctgctggacggctccgagcggctgggtgagcagaacttccacaaggcccggcgcttcgtggagcaggtggcgcggcggctgacgctggcccggagggacgacgaccctctcaacgcacgcgtggcgctgctgcagtttggtggccccggcgagcagcaggtggccttcccgctgagccacaacctcacggccatccacgaggcgctggagaccacacaatacctgaactccttctcgcacgtgggcgcaggcgtggtgcacgccatcaatgccatcgtgcgcagcccgcgtggcggggcccggaggcacgcagagctgtccttcgtgttcctcacggacggcgtcacgggcaacgacagtctgcacgagtcggcgcactccatgcgcaagcagaacgtggtacccaccgtgctggccttgggcagcgacgtggacatggacgtgctcaccacgctcagcctgggtgaccgcgccgccgtgttccacgagaaggactatgacagcctggcgcaacccggcttcttcgaccgcttcatccgctggatctgctagcgccgccgcccgggccccgcagtcgagggtcgtgagcccaccccgtccatggtgctaagcgggcccgggtcccacacggccagcaccgctgctcactcggacgacgccctgggcctgcacctctccagctcctcccacggggtccccgtagccccggcccccgcccagccccaggtctccccaggccctccgcaggctgcccggcctccctccccctgcagccatcccaaggctcctgacctacctggcccctgagctctggagcaagccctgacccaataaaggctttgaacccataaaaaaaaaaaaaaaa

SEQ ID NO: 165 - DNA, 10562 bp, Homo sapiens
cagtttggagctcagtcttccaccaaaggccgttcagttctcctgggctccagcctcctgcaaggactgcaagagttttcctccgcagctctgagtctccacttttttggtggagaaaggctgcaaaaagaaaaagagacgcagtgagtgggaaaagtatgcatcctattcaaacctaattgaatcgaggagcccagggacacacgccttcaggtttgctcaggggttcatatttggtgcttagacaaattcaaaatgaggaaacatcggcacttgcccttagtggccgtcttttgcctctttctctcaggctttcctacaactcatgcccagcagcagcaagcagatgtcaaaaatggtgcggctgctgatataatatttctagtggattcctcttggaccattggagaggaacatttccaacttgttcgagagtttctatatgatgttgtaaaatccttagctgtgggagaaaatgatttccattttgctctggtccagttcaacggaaacccacataccgagttcctgttaaatacgtatcgtactaaacaagaagtcctttctcatatttccaacatgtcttatattgggggaaccaatcagactggaaaaggattagaatacataatgcaaagccacctcaccaaggctgctggaagccgggccggtgacggagtccctcaggttatcgtagtgttaactgatggacactcgaaggatggccttgctctgccctcagcggaacttaagtctgctgatgttaacgtgtttgcaattggagttgaggatgcagatgaaggagcgttaaaagaaatagcaagtgaaccgctcaatatgcatatgttcaacctagagaattttacctcacttcatgacatagtaggaaacttagtgtcctgtgtgcattcatccgtgagtccagaaagggctggggacacggaaacccttaaagacatcacagcacaagactctgctgacattattttccttattgatggatcaaacaacaccggaagtgtcaatttcgcagtcattctcgacttccttgtaaatctccttgagaaactcccaattggaactcagcagatccgagtgggggtggtccagtttagcgatgagcccagaaccatgttctccttggacacctactccaccaaggcccaggttctgggtgcagtgaaagccctcgggtttgctggtggggagttggccaatatcggcctcgcccttgatttcgtggtggagaaccacttcacccgggcagggggcagccgcgtggaggaaggggttccccaggtgctggtcctcataagtgccgggccttctagtgacgagattcgctacggggtggtagcactgaagcaggctagcgtgttctcattcggccttggagcccaggccgcctccagggcagagcttcagcacatagctaccgatgacaacttggtgtttactgtcccggaattccgtagctttggggacctccaggagaaattactgccgtacattgttggcgtggcccaaaggcacattgtcttgaaaccgccaaccattgtcacacaagtcattgaagtcaacaagagagacatagtcttcctggtggatggctcatctgcactgggactggccaacttcaatgccatccgagacttcattgctaaagtcatccagaggctggaaatcggacaggatcttatccaggtggcagtggcccagtatgcagacactgtgaggcctgaattttatttcaatacccatccaacaaaaagggaagtcataaccgctgtgcggaaaatgaagcccctggacggctcggccctgtacacgggctctgctctagactttgttcgtaacaacctattcacgagttcagccggctaccgggctgccgaggggattcctaagcttttggtgctgatcacaggtggtaagtccctagatgaaatcagccagcctgcccaggagctgaagagaagcagcataatggcctttgccattgggaacaagggtgccgatcaggctgagctggaagagatcgctttcgactcctccctggtgttcatcccagctgagttccgagccgccccattgcaaggcatgctgcctggcttgctggcacctctcaggaccctctctggaacccctgaagttcactcaaacaaaagggatatcatctttcttttggatggatcagccaacgttggaaaaaccaatttcccttatgtgcgcgactttgtaatgaacctagttaacagccttgatattggaaatgacaatattcgtgttggtttagtgcaatttagtgacactcctgtaacggagttctctttaaacacataccagaccaagtcagatatccttggtcatctgaggcagctgcagctccagggaggttcgggcctgaacacaggctcagccctaagctatgtctatgccaaccacttcacggaagctggcggcagcaggatccgtgaacacgtgccgcagctcctgcttctgctcacagctgggcagtctgaggactcctatttgcaagctgccaacgccttgacacgcgcgggcatcctgactttttgtgtgggagctagccaggcgaataaggcagagcttgagcagattgcttttaacccaagcctggtgtatctcatggatgatttcagctccctgccagctttgcctcagcagctgattcagcccctaaccacatatgttagtggaggtgtggaggaagtaccactcgctcagccagagagcaagcgagacattctgttcctctttgacggctcagccaatcttgtgggccagttccctgttgtccgtgactttctctacaagattatcgatgagctcaatgtgaagccagaggggacccgaattgcggtggctcagtacagcgatgatgtcaaggtggagtcccgttttgatgagcaccagagtaagcctgagatcctgaatcttgtgaagagaatgaagatcaagacgggcaaagccctcaacctgggctacgcgctggactatgcacagaggtacatttttgtgaagtctgctggcagccggatcgaggatggagtgcttcagttcctggtgctgctggtcgcaggaaggtcatctgaccgtgtggatgggccagcaagtaacctgaagcagagtggggttgtgcctttcatcttccaagccaagaacgcagaccctgctgagttagagcagatcgtgctgtctccagcgtttatcctggctgcagagtcgcttcccaagattggagatcttcatccacagatagtgaatctcttaaaatcagtgcacaacggagcaccagcaccagtttcaggtgaaaaggacgtggtgtttctgcttgatggctctgagggcgtcaggagcggcttccctctgttgaaagagtttgtccagagagtggtggaaagcctggatgtgggccaggaccgggtccgcgtggccgtggtgcagtacagcgaccggaccaggcccgagttctacctgaattcatacatgaacaagcaggacgtcgtcaacgctgtccgccagctgaccctgctgggagggccgacccccaacaccggggccgccctggagtttgtcctgaggaacatcctggtcagctctgcgggaagcaggataacagaaggtgtgccccagctgctgatcgtcctcacggccgacaggtctggggatgatgtgcggaacccctccgtggtcgtgaagaggggtggggctgtgcccattggcattggcatcgggaacgctgacatcacagagatgcagaccatctccttcatcccggactttgccgtggccattcccacctttcgccagctggggaccgtccaacaggtcatctctgagagggtgacccagctcacccgcgaggagctgagcaggctgcagccggtgttgcagcctctaccgagcccaggtgttggtggcaagagggacgtggtctttctcatcgatgggtcccaaagtgccgggcctgagttccagtacgttcgcaccctcatagagaggctggttgactacctggacgtgggctttgacaccacccgggtggctgtcatccagttcagcgatgaccccaaggtggagttcctgctgaacgcccattccagcaaggatgaagtgcagaacgcggtgcagcggctgaggcccaagggagggcggcagatcaacgtgggcaatgccctggagtacgtgtccaggaacatcttcaagaggcccctggggagccgcattgaagagggcgtcccgcagttcctggtcctcatctcgtctggaaagtctgacgatgaggtggacgacccggcggtggagctcaagcagtttggcgtggcccctttcacgatcgccaggaacgcagaccaggaggagctggtgaagatctcgctgagccccgaatatgtgttctcggtgagcaccttccgggagctgcccagcctggagcagaaactgctgacgcccatcacgaccctgacctcagagcagatccagaagctcttagccagcactcgctatccacctccagcagttgagagtgatgctgcagacattgtctttctgatcgacagctctgagggagttaggccagatggctttgcacatattcgagattttgttagcaggattgttcgaagactcaacatcggccccagtaaagtgagagttggggtcgtgcagttcagcaatgatgtcttcccagaattctatctgaaaacctacagatcccaggccccggtgctggacgccatacggcgcctgaggctcagaggggggtccccactgaacactggcaaggctctcgaatttgtggcaagaaacctctttgttaagtctgcggggagtcgcatagaagacggggtgccccaacacctggtcctggtcctgggtggaaaatcccaggacgatgtgtccaggttcgcccaggtgatccgttcctcgggcattgtgagtttaggggtaggagaccggaacatcgacagaacagagctgcagaccatcaccaatgaccccagactggtcttcacagtgcgagagttcagagagcttcccaacatagaagaaagaatcatgaactcgtttggaccctccgcagccactcctgcacctccaggggtggacacccctcctccttcacggccagagaagaagaaagcagacattgtgttcctgttggatggttccatcaacttcaggagggacagtttccaggaagtgcttcgttttgtgtctgaaatagtggacacagtttatgaagatggcgactccatccaagtggggcttgtccagtacaactctgaccccactgacgaattcttcctgaaggacttctctaccaagaggcagattattgacgccatcaacaaagtggtctacaaagggggaagacacgccaacactaaggtgggccttgagcacctgcgggtaaaccactttgtgcctgaggcaggcagccgcctggaccagcgggtccctcagattgcctttgtgatcacgggaggaaagtcggtggaagatgcacaggatgtgagcctggccctcacccagaggggggtcaaagtgtttgctgttggagtgaggaatatcgactcggaggaggttggaaagatagcgtccaacagcgccacagcgttccgcgtgggcaacgtccaggagctgtccgaactgagcgagcaagttttggaaactttgcatgatgcgatgcatgaaaccctttgccctggtgtaactgatgctgccaaagcttgtaatctggatgtgattctggggtttgatggttctagagaccagaatgtttttgtggcccagaagggcttcgagtccaaggtggacgccatcttgaacagaatcagccagatgcacagggtcagctgcagcggtggccgctcgcccaccgtgcgtgtgtcagtggtggccaacacgccctcgggcccggtggaggcctttgactttgacgagtaccagccagagatgctcgagaagttccggaacatgcgcagccagcacccctacgtcctcacggaggacaccctgaaggtctacctgaacaagttcagacagtcctcgccggacagcgtgaaggtggtcattcattttactgatggagcagacggagatctggctgatttacacagagcatctgagaacctccgccaagaaggagtccgtgccttgatcctggtgggccttgaacgagtggtcaacttggagcggctaatgcatctggagtttgggcgagggtttatgtatgacaggcccctgaggcttaacttgctggacttggattatgaactagcggagcagcttgacaacattgccgagaaagcttgctgtggggttccctgcaagtgctctgggcagaggggagaccgcgggcccatcggcagcatcgggccaaagggtattcctggagaagacggctaccgaggctatcctggtgatgagggtggacccggtgagcgtggtccgcctggtgtgaacggcactcaaggtttccagggctgcccgggccagagaggagtaaagggctctcggggattcccaggagagaagggcgaagtaggagaaattggactggatggtctggatggtgaagatggagacaaaggattgcctggttcttctggagagaaagggaatcctggaagaaggggtgataaaggacctcgaggagagaaaggagaaagaggagatgttgggattcgaggggacccgggtaacccaggacaagacagccaggagagaggacccaaaggagaaaccggtgacctcggccccatgggtgtcccagggagagatggagtacctggaggacctggagaaactgggaagaatggtggctttggccgaaggggaccccccggagctaagggcaacaagggcggtcctggccagccgggctttgagggagagcaggggaccagaggtgcacagggcccagctggtcctgctggtcctccagggctgataggagaacaaggcatttctggacctcggggaagcggaggtgccgctggtgctcctggagaacgaggcagaaccggtccactgggaagaaagggtgagcccggagagccaggaccaaaaggaggaatcgggaaccggggccctcgtggggagacgggagatgacgggagagacggagttggcagtgaaggacgcagaggcaaaaaaggagaaagaggattccctggatacccaggaccaaagggtaacccaggtgaacctgggctaaatggaacaacaggacccaaaggcatcagaggccgaaggggaaattcgggacctccagggatagttggacagaagggagaccctggctacccaggaccagctggtcccaagggcaacaggggcgactccatcgatcaatgtgccctcatccaaagcatcaaagataaatgcccttgctgttacgggcccctggagtgccccgtcttcccaacagaactagcctttgctttagacacctctgagggagtcaaccaagacactttcggccggatgcgagatgtggtcttgagtattgtgaatgacctgaccattgctgagagcaactgcccacggggggcccgggtggctgtggtcacctacaacaacgaggtgaccacggagatccggtttgctgactccaagaggaagtcggtcctcctggacaagattaagaaccttcaggtggctctgacatccaaacagcagagtctggagactgccatgtcgtttgtggccaggaacacatttaagcgtgtgaggaacggattcctaatgaggaaagtggctgttttcttcagcaacacacccacaagagcatccccacagctcagagaggctgtgctcaagctctcagatgcggggatcacccccttgttccttacaaggcaggaagaccggcagctcatcaacgctttgcagatcaataacacagcagtggggcatgcgcttgtcctgcctgcagggagagacctcacagacttcctggagaatgtcctcacgtgtcatgtttgcttggacatctgcaacatcgacccatcctgtggatttggcagttggaggccttccttcagggacaggagagcggcagggagcgatgtggacatcgacatggctttcatcttagacagcgctgagaccaccaccctgttccagttcaatgagatgaagaagtacatagcgtacctggtcagacaactggacatgagcccagatcccaaggcctcccagcacttcgccagagtggcagttgtgcagcacgcgccctctgagtccgtggacaatgccagcatgccacctgtgaaggtggaattctccctgactgactatggctccaaggagaagctggtggacttcctcagcaggggaatgacacagttgcagggaaccagggccttaggcagtgccattgaatacaccatagagaatgtctttgaaagtgccccaaacccacgggacctgaaaattgtggtcctgatgctgacgggcgaggtgccggagcagcagctggaggaggcccagagagtcatcctgcaggccaaatgcaagggctacttcttcgtggtcctgggcattggcaggaaggtgaacatcaaggaggtatacaccttcgccagtgagccaaacgacgtcttcttcaaattagtggacaagtccaccgagctcaacgaggagcctttgatgcgcttcgggaggctgttgccatccttcgtcagcagtgaaaatgctttttacttgtccccagatatcaggaaacagtgtgattggttccaaggggaccaacccacaaagaaccttgtgaagtttggtcacaaacaagtaaatgttccgaataacgttacttcaagtcctacatccaacccagtgacgacaacgaagccggtgactacgacgaagccggtgaccaccacaacaaagcctgtaaccaccacaacaaagcctgtgactattataaatcagccatctgtgaagccagccgctgcaaagccggcccctgcgaaacctgtggctgccaagcctgtggccacaaagatggccactgttagacccccagtggcggtgaagccagcaacggcagcgaagcctgtagcagcaaagccagcagctgtaagaccccccgctgctgctgctgcaaaaccagtggcgaccaagcctgaggtccctaggccacaggcagccaaaccagctgccaccaagccagccaccactaagcccatggttaagatgtcccgtgaagtccaggtgtttgagataacagagaacagcgccaaactccactgggagagggctgagccccccggtccttatttttatgacctcaccgtcacctcagcccatgatcagtccctggttctgaagcagaacctcacggtcacggaccgcgtcattggaggcctgctcgctgggcagacataccatgtggctgtggtctgctacctgaggtctcaggtcagagccacctaccacggaagtttcagtacaaagaaatctcagcccccacctccacagccagcaaggtcagcttctagttcaaccatcaatctaatggtgagcacagaaccattggctctcactgaaacagatatatgcaagttgccgaaagacgaaggaacttgcagggatttcatattaaaatggtactatgatccaaacaccaaaagctgtgcaagattctggtatggaggttgtggtggaaacgaaaacaaatttggatcacagaaagaatgtgaaaaggtttgcgctcctgtgctcgccaaacccggagtcatcagtgtgatgggaacctaagcgtgggtggccaacatcatatacctcttgaagaagaaggagtcagccatcgccaacttgtctctgtagaagctccgggtgtagattcccttgcactgtatcatttcatgctttgatttacactcgaactcgggagggaacatcctgctgcatgacctatcagtatggtgctaatgtgtctgtggaccctcgctctctgtctccaggcagttctctcgaatactttgaatgttgtgtaacagttagccactgctggtgtttatgtgaacattcctatcaatccaaattccctctggagtttcatgttatgcctgttgcaggcaaatgtaaagtctagaaaataatgcaaatgtcacggctactctatatacttttgcttggttcattttttttcccttttagttaagcatgactttagatgggaagcctgtgtatcgtggagaaacaagagaccaactttttcattccctgcccccaatttcccagactagatttcaagctaattttctttttctgaagcctctaacaaatgatctagttcagaaggaagcaaaatcccttaatctatgtgcaccgttgggaccaatgccttaattaaagaatttaaaaaagttgtaatagagaatatttttggcattcctctaatgttgtgtgttttttttttgtgtgtgctggagggaggggatttaattttaattttaaaatgtttaggaaatttatacaaagaaactttttaataaagtatattgaaagttaaaaaaaaaaaaaaaaaa

SEQ ID NO: 166 - DNA, 10061 bp, Homo sapiens
cagtttggagctcagtcttccaccaaaggccgttcagttctcctgggctccagcctcctgcaaggactgcaagagttttcctccgcagctctgagtctccacttttttggtggagaaaggctgcaaaaagaaaaagagacgcagtgagtgggaaaagtatgcatcctattcaaacctaattgaatcgaggagcccagggacacacgccttcaggtttgctcaggggttcatatttggtgcttagacaaattcaaaatgaggaaacatcggcacttgcccttagtggccgtcttttgcctctttctctcaggctttcctacaactcatgcccagcagcagcaagcagatgtcaaaaatggtgcggctgctgatataatatttctagtggattcctcttggaccattggagaggaacatttccaacttgttcgagagtttctatatgatgttgtaaaatccttagctgtgggagaaaatgatttccattttgctctggtccagttcaacggaaacccacataccgagttcctgttaaatacgtatcgtactaaacaagaagtcctttctcatatttccaacatgtcttatattgggggaaccaatcagactggaaaaggattagaatacataatgcaaagccacctcaccaaggctgctggaagccgggccggtgacggagtccctcaggttatcgtagtgttaactgatggacactcgaaggatggccttgctctgccctcagcggaacttaagtctgctgatgttaacgtgtttgcaattggagttgaggatgcagatgaaggagcgttaaaagaaatagcaagtgaaccgctcaatatgcatatgttcaacctagagaattttacctcacttcatgacatagtaggaaacttagtgtcctgtgtgcattcatccgtgagtccagaaagggctggggacacggaaacccttaaagacatcacagcacaagactctgctgacattattttccttattgatggatcaaacaacaccggaagtgtcaatttcgcagtcattctcgacttccttgtaaatctccttgagaaactcccaattggaactcagcagatccgagtgggggtggtccagtttagcgatgagcccagaaccatgttctccttggacacctactccaccaaggcccaggttctgggtgcagtgaaagccctcgggtttgctggtggggagttggccaatatcggcctcgcccttgatttcgtggtggagaaccacttcacccgggcagggggcagccgcgtggaggaaggggttccccaggtgctggtcctcataagtgccgggccttctagtgacgagattcgctacggggtggtagcactgaagcaggctagcgtgttctcattcggccttggagcccaggccgcctccagggcagagcttcagcacatagctaccgatgacaacttggtgtttactgtcccggaattccgtagctttggggacctccaggagaaattactgccgtacattgttggcgtggcccaaaggcacattgtcttgaaaccgccaaccattgtcacacaagtcattgaagtcaacaagagagacatagtcttcctggtggatggctcatctgcactgggactggccaacttcaatgccatccgagacttcattgctaaagtcatccagaggctggaaatcggacaggatcttatccaggtggcagtggcccagtatgcagacactgtgaggcctgaattttatttcaatacccatccaacaaaaagggaagtcataaccgctgtgcggaaaatgaagcccctggacggctcggccctgtacacgggctctgctctagactttgttcgtaacaacctattcacgagttcagccggctaccgggctgccgaggggattcctaagcttttggtgctgatcacaggtggtaagtccctagatgaaatcagccagcctgcccaggagctgaagagaagcagcataatggcctttgccattgggaacaagggtgccgatcaggctgagctggaagagatcgctttcgactcctccctggtgttcatcccagctgagttccgagccgccccattgcaaggcatgctgcctggcttgctggcacctctcaggaccctctctggaacccctgaagttcactcaaacaaaagggatatcatctttcttttggatggatcagccaacgttggaaaaaccaatttcccttatgtgcgcgactttgtaatgaacctagttaacagccttgatattggaaatgacaatattcgtgttggtttagtgcaatttagtgacactcctgtaacggagttctctttaaacacataccagaccaagtcagatatccttggtcatctgaggcagctgcagctccagggaggttcgggcctgaacacaggctcagccctaagctatgtctatgccaaccacttcacggaagctggcggcagcaggatccgtgaacacgtgccgcagctcctgcttctgctcacagctgggcagtctgaggactcctatttgcaagctgccaacgccttgacacgcgcgggcatcctgactttttgtgtgggagctagccaggcgaataaggcagagcttgagcagattgcttttaacccaagcctggtgtatctcatggatgatttcagctccctgccagctttgcctcagcagctgattcagcccctaaccacatatgttagtggaggtgtggaggaagtaccactcgctcagccagagagcaagcgagacattctgttcctctttgacggctcagccaatcttgtgggccagttccctgttgtccgtgactttctctacaagattatcgatgagctcaatgtgaagccagaggggacccgaattgcggtggctcagtacagcgatgatgtcaaggtggagtcccgttttgatgagcaccagagtaagcctgagatcctgaatcttgtgaagagaatgaagatcaagacgggcaaagccctcaacctgggctacgcgctggactatgcacagaggtacatttttgtgaagtctgctggcagccggatcgaggatggagtgcttcagttcctggtgctgctggtcgcaggaaggtcatctgaccgtgtggatgggccagcaagtaacctgaagcagagtggggttgtgcctttcatcttccaagccaagaacgcagaccctgctgagttagagcagatcgtgctgtctccagcgtttatcctggctgcagagtcgcttcccaagattggagatcttcatccacagatagtgaatctcttaaaatcagtgcacaacggagcaccagcaccagtttcaggtgaaaaggacgtggtgtttctgcttgatggctctgagggcgtcaggagcggcttccctctgttgaaagagtttgtccagagagtggtggaaagcctggatgtgggccaggaccgggtccgcgtggccgtggtgcagtacagcgaccggaccaggcccgagttctacctgaattcatacatgaacaagcaggacgtcgtcaacgctgtccgccagctgaccctgctgggagggccgacccccaacaccggggccgccctggagtttgtcctgaggaacatcctggtcagctctgcgggaagcaggataacagaaggtgtgccccagctgctgatcgtcctcacggccgacaggtctggggatgatgtgcggaacccctccgtggtcgtgaagaggggtggggctgtgcccattggcattggcatcgggaacgctgacatcacagagatgcagaccatctccttcatcccggactttgccgtggccattcccacctttcgccagctggggaccgtccaacaggtcatctctgagagggtgacccagctcacccgcgaggagctgagcaggctgcagccggtgttgcagcctctaccgagcccaggtgttggtggcaagagggacgtggtctttctcatcgatgggtcccaaagtgccgggcctgagttccagtacgttcgcaccctcatagagaggctggttgactacctggacgtgggctttgacaccacccgggtggctgtcatccagttcagcgatgaccccaaggtggagttcctgctgaacgcccattccagcaaggatgaagtgcagaacgcggtgcagcggctgaggcccaagggagggcggcagatcaacgtgggcaatgccctggagtacgtgtccaggaacatcttcaagaggcccctggggagccgcattgaagagggcgtcccgcagttcctggtcctcatctcgtctggaaagtctgacgatgaggtggacgacccggcggtggagctcaagcagtttggcgtggcccctttcacgatcgccaggaacgcagaccaggaggagctggtgaagatctcgctgagccccgaatatgtgttctcggtgagcaccttccgggagctgcccagcctggagcagaaactgctgacgcccatcacgaccctgacctcagagcagatccagaagctcttagccagcactcgctatccacctccagtgcgagagttcagagagcttcccaacatagaagaaagaatcatgaactcgtttggaccctccgcagccactcctgcacctccaggggtggacacccctcctccttcacggccagagaagaagaaagcagacattgtgttcctgttggatggttccatcaacttcaggagggacagtttccaggaagtgcttcgttttgtgtctgaaatagtggacacagtttatgaagatggcgactccatccaagtggggcttgtccagtacaactctgaccccactgacgaattcttcctgaaggacttctctaccaagaggcagattattgacgccatcaacaaagtggtctacaaagggggaagacacgccaacactaaggtgggccttgagcacctgcgggtaaaccactttgtgcctgaggcaggcagccgcctggaccagcgggtccctcagattgcctttgtgatcacgggaggaaagtcggtggaagatgcacaggatgtgagcctggccctcacccagaggggggtcaaagtgtttgctgttggagtgaggaatatcgactcggaggaggttggaaagatagcgtccaacagcgccacagcgttccgcgtgggcaacgtccaggagctgtccgaactgagcgagcaagttttggaaactttgcatgatgcgatgcatgaaaccctttgccctggtgtaactgatgctgccaaagcttgtaatctggatgtgattctggggtttgatggttctagagaccagaatgtttttgtggcccagaagggcttcgagtccaaggtggacgccatcttgaacagaatcagccagatgcacagggtcagctgcagcggtggccgctcgcccaccgtgcgtgtgtcagtggtggccaacacgccctcgggcccggtggaggcctttgactttgacgagtaccagccagagatgctcgagaagttccggaacatgcgcagccagcacccctacgtcctcacggaggacaccctgaaggtctacctgaacaagttcagacagtcctcgccggacagcgtgaaggtggtcattcattttactgatggagcagacggagatctggctgatttacacagagcatctgagaacctccgccaagaaggagtccgtgccttgatcctggtgggccttgaacgagtggtcaacttggagcggctaatgcatctggagtttgggcgagggtttatgtatgacaggcccctgaggcttaacttgctggacttggattatgaactagcggagcagcttgacaacattgccgagaaagcttgctgtggggttccctgcaagtgctctgggcagaggggagaccgcgggcccatcggcagcatcgggccaaagggtattcctggagaagacggctaccgaggctatcctggtgatgagggtggacccggtgagcgtggtccgcctggtgtgaacggcactcaaggtttccagggctgcccgggccagagaggagtaaagggctctcggggattcccaggagagaagggcgaagtaggagaaattggactggatggtctggatggtgaagatggagacaaaggattgcctggttcttctggagagaaagggaatcctggaagaaggggtgataaaggacctcgaggagagaaaggagaaagaggagatgttgggattcgaggggacccgggtaacccaggacaagacagccaggagagaggacccaaaggagaaaccggtgacctcggccccatgggtgtcccagggagagatggagtacctggaggacctggagaaactgggaagaatggtggctttggccgaaggggaccccccggagctaagggcaacaagggcggtcctggccagccgggctttgagggagagcaggggaccagaggtgcacagggcccagctggtcctgctggtcctccagggctgataggagaacaaggcatttctggacctcggggaagcggaggtgccgctggtgctcctggagaacgaggcagaaccggtccactgggaagaaagggtgagcccggagagccaggaccaaaaggaggaatcgggaaccggggccctcgtggggagacgggagatgacgggagagacggagttggcagtgaaggacgcagaggcaaaaaaggagaaagaggattccctggatacccaggaccaaagggtaacccaggtgaacctgggctaaatggaacaacaggacccaaaggcatcagaggccgaaggggaaattcgggacctccagggatagttggacagaagggagaccctggctacccaggaccagctggtcccaagggcaacaggggcgactccatcgatcaatgtgccctcatccaaagcatcaaagataaatgcccttgctgttacgggcccctggagtgccccgtcttcccaacagaactagcctttgctttagacacctctgagggagtcaaccaagacactttcggccggatgcgagatgtggtcttgagtattgtgaatgacctgaccattgctgagagcaactgcccacggggggcccgggtggctgtggtcacctacaacaacgaggtgaccacggagatccggtttgctgactccaagaggaagtcggtcctcctggacaagattaagaaccttcaggtggctctgacatccaaacagcagagtctggagactgccatgtcgtttgtggccaggaacacatttaagcgtgtgaggaacggattcctaatgaggaaagtggctgttttcttcagcaacacacccacaagagcatccccacagctcagagaggctgtgctcaagctctcagatgcggggatcacccccttgttccttacaaggcaggaagaccggcagctcatcaacgctttgcagatcaataacacagcagtggggcatgcgcttgtcctgcctgcagggagagacctcacagacttcctggagaatgtcctcacgtgtcatgtttgcttggacatctgcaacatcgacccatcctgtggatttggcagttggaggccttccttcagggacaggagagcggcagggagcgatgtggacatcgacatggctttcatcttagacagcgctgagaccaccaccctgttccagttcaatgagatgaagaagtacatagcgtacctggtcagacaactggacatgagcccagatcccaaggcctcccagcacttcgccagagtggcagttgtgcagcacgcgccctctgagtccgtggacaatgccagcatgccacctgtgaaggtggaattctccctgactgactatggctccaaggagaagctggtggacttcctcagcaggggaatgacacagttgcagggaaccagggccttaggcagtgccattgaatacaccatagagaatgtctttgaaagtgccccaaacccacgggacctgaaaattgtggtcctgatgctgacgggcgaggtgccggagcagcagctggaggaggcccagagagtcatcctgcaggccaaatgcaagggctacttcttcgtggtcctgggcattggcaggaaggtgaacatcaaggaggtatacaccttcgccagtgagccaaacgacgtcttcttcaaattagtggacaagtccaccgagctcaacgaggagcctttgatgcgcttcgggaggctgttgccatccttcgtcagcagtgaaaatgctttttacttgtccccagatatcaggaaacagtgtgattggttccaaggggaccaacccacaaagaaccttgtgaagtttggtcacaaacaagtaaatgttccgaataacgttacttcaagtcctacatccaacccagtgacgacaacgaagccggtgactacgacgaagccggtgaccaccacaacaaagcctgtaaccaccacaacaaagcctgtgactattataaatcagccatctgtgaagccagccgctgcaaagccggcccctgcgaaacctgtggctgccaagcctgtggccacaaagatggccactgttagacccccagtggcggtgaagccagcaacggcagcgaagcctgtagcagcaaagccagcagctgtaagaccccccgctgctgctgctgcaaaaccagtggcgaccaagcctgaggtccctaggccacaggcagccaaaccagctgccaccaagccagccaccactaagcccatggttaagatgtcccgtgaagtccaggtgtttgagataacagagaacagcgccaaactccactgggagagggctgagccccccggtccttatttttatgacctcaccgtcacctcagcccatgatcagtccctggttctgaagcagaacctcacggtcacggaccgcgtcattggaggcctgctcgctgggcagacataccatgtggctgtggtctgctacctgaggtctcaggtcagagccacctaccacggaagtttcagtacaaagaaatctcagcccccacctccacagccagcaaggtcagcttctagttcaaccatcaatctaatggtgagcacagaaccattggctctcactgaaacagatatatgcaagttgccgaaagacgaaggaacttgcagggatttcatattaaaatggtactatgatccaaacaccaaaagctgtgcaagattctggtatggaggttgtggtggaaacgaaaacaaatttggatcacagaaagaatgtgaaaaggtttgcgctcctgtgctcgccaaacccggagtcatcagtgtgatgggaacctaagcgtgggtggccaacatcatatacctcttgaagaagaaggagtcagccatcgccaacttgtctctgtagaagctccgggtgtagattcccttgcactgtatcatttcatgctttgatttacactcgaactcgggagggaacatcctgctgcatgacctatcagtatggtgctaatgtgtctgtggaccctcgctctctgtctccaggcagttctctcgaatactttgaatgttgtgtaacagttagccactgctggtgtttatgtgaacattcctatcaatccaaattccctctggagtttcatgttatgcctgttgcaggcaaatgtaaagtctagaaaataatgcaaatgtcacggctactctatatacttttgcttggttcattttttttcccttttagttaagcatgactttagatgggaagcctgtgtatcgtggagaaacaagagaccaactttttcattccctgcccccaatttcccagactagatttcaagctaattttctttttctgaagcctctaacaaatgatctagttcagaaggaagcaaaatcccttaatctatgtgcaccgttgggaccaatgccttaattaaagaatttaaaaaagttgtaatagagaatatttttggcattcctctaatgttgtgtgttttttttttgtgtgtgctggagggaggggatttaattttaattttaaaatgtttaggaaatttatacaaagaaactttttaataaagtatattgaaagttaaaaaaaaaaaaaaaaaa

SEQ ID NO: 167 - DNA, 9962 bp, Homo sapiens
cagtttggagctcagtcttccaccaaaggccgttcagttctcctgggctccagcctcctgcaaggactgcaagagttttcctccgcagctctgagtctccacttttttggtggagaaaggctgcaaaaagaaaaagagacgcagtgagtgggaaaagtatgcatcctattcaaacctaattgaatcgaggagcccagggacacacgccttcaggtttgctcaggggttcatatttggtgcttagacaaattcaaaatgaggaaacatcggcacttgcccttagtggccgtcttttgcctctttctctcaggctttcctacaactcatgcccagcagcagcaagcagatgtcaaaaatggtgcggctgctgatataatatttctagtggattcctcttggaccattggagaggaacatttccaacttgttcgagagtttctatatgatgttgtaaaatccttagctgtgggagaaaatgatttccattttgctctggtccagttcaacggaaacccacataccgagttcctgttaaatacgtatcgtactaaacaagaagtcctttctcatatttccaacatgtcttatattgggggaaccaatcagactggaaaaggattagaatacataatgcaaagccacctcaccaaggctgctggaagccgggccggtgacggagtccctcaggttatcgtagtgttaactgatggacactcgaaggatggccttgctctgccctcagcggaacttaagtctgctgatgttaacgtgtttgcaattggagttgaggatgcagatgaaggagcgttaaaagaaatagcaagtgaaccgctcaatatgcatatgttcaacctagagaattttacctcacttcatgacatagtaggaaacttagtgtcctgtgtgcattcatccgtgagtccagaaagggctggggacacggaaacccttaaagacatcacagcacaagactctgctgacattattttccttattgatggatcaaacaacaccggaagtgtcaatttcgcagtcattctcgacttccttgtaaatctccttgagaaactcccaattggaactcagcagatccgagtgggggtggtccagtttagcgatgagcccagaaccatgttctccttggacacctactccaccaaggcccaggttctgggtgcagtgaaagccctcgggtttgctggtggggagttggccaatatcggcctcgcccttgatttcgtggtggagaaccacttcacccgggcagggggcagccgcgtggaggaaggggttccccaggtgctggtcctcataagtgccgggccttctagtgacgagattcgctacggggtggtagcactgaagcaggctagcgtgttctcattcggccttggagcccaggccgcctccagggcagagcttcagcacatagctaccgatgacaacttggtgtttactgtcccggaattccgtagctttggggacctccaggagaaattactgccgtacattgttggcgtggcccaaaggcacattgtcttgaaaccgccaaccattgtcacacaagtcattgaagtcaacaagagagacatagtcttcctggtggatggctcatctgcactgggactggccaacttcaatgccatccgagacttcattgctaaagtcatccagaggctggaaatcggacaggatcttatccaggtggcagtggcccagtatgcagacactgtgaggcctgaattttatttcaatacccatccaacaaaaagggaagtcataaccgctgtgcggaaaatgaagcccctggacggctcggccctgtacacgggctctgctctagactttgttcgtaacaacctattcacgagttcagccggctaccgggctgccgaggggattcctaagcttttggtgctgatcacaggtggtaagtccctagatgaaatcagccagcctgcccaggagctgaagagaagcagcataatggcctttgccattgggaacaagggtgccgatcaggctgagctggaagagatcgctttcgactcctccctggtgttcatcccagctgagttccgagccgccccattgcaaggcatgctgcctggcttgctggcacctctcaggaccctctctggaacccctgaagagagcaagcgagacattctgttcctctttgacggctcagccaatcttgtgggccagttccctgttgtccgtgactttctctacaagattatcgatgagctcaatgtgaagccagaggggacccgaattgcggtggctcagtacagcgatgatgtcaaggtggagtcccgttttgatgagcaccagagtaagcctgagatcctgaatcttgtgaagagaatgaagatcaagacgggcaaagccctcaacctgggctacgcgctggactatgcacagaggtacatttttgtgaagtctgctggcagccggatcgaggatggagtgcttcagttcctggtgctgctggtcgcaggaaggtcatctgaccgtgtggatgggccagcaagtaacctgaagcagagtggggttgtgcctttcatcttccaagccaagaacgcagaccctgctgagttagagcagatcgtgctgtctccagcgtttatcctggctgcagagtcgcttcccaagattggagatcttcatccacagatagtgaatctcttaaaatcagtgcacaacggagcaccagcaccagtttcaggtgaaaaggacgtggtgtttctgcttgatggctctgagggcgtcaggagcggcttccctctgttgaaagagtttgtccagagagtggtggaaagcctggatgtgggccaggaccgggtccgcgtggccgtggtgcagtacagcgaccggaccaggcccgagttctacctgaattcatacatgaacaagcaggacgtcgtcaacgctgtccgccagctgaccctgctgggagggccgacccccaacaccggggccgccctggagtttgtcctgaggaacatcctggtcagctctgcgggaagcaggataacagaaggtgtgccccagctgctgatcgtcctcacggccgacaggtctggggatgatgtgcggaacccctccgtggtcgtgaagaggggtggggctgtgcccattggcattggcatcgggaacgctgacatcacagagatgcagaccatctccttcatcccggactttgccgtggccattcccacctttcgccagctggggaccgtccaacaggtcatctctgagagggtgacccagctcacccgcgaggagctgagcaggctgcagccggtgttgcagcctctaccgagcccaggtgttggtggcaagagggacgtggtctttctcatcgatgggtcccaaagtgccgggcctgagttccagtacgttcgcaccctcatagagaggctggttgactacctggacgtgggctttgacaccacccgggtggctgtcatccagttcagcgatgaccccaaggtggagttcctgctgaacgcccattccagcaaggatgaagtgcagaacgcggtgcagcggctgaggcccaagggagggcggcagatcaacgtgggcaatgccctggagtacgtgtccaggaacatcttcaagaggcccctggggagccgcattgaagagggcgtcccgcagttcctggtcctcatctcgtctggaaagtctgacgatgaggtggacgacccggcggtggagctcaagcagtttggcgtggcccctttcacgatcgccaggaacgcagaccaggaggagctggtgaagatctcgctgagccccgaatatgtgttctcggtgagcaccttccgggagctgcccagcctggagcagaaactgctgacgcccatcacgaccctgacctcagagcagatccagaagctcttagccagcactcgctatccacctccagcagttgagagtgatgctgcagacattgtctttctgatcgacagctctgagggagttaggccagatggctttgcacatattcgagattttgttagcaggattgttcgaagactcaacatcggccccagtaaagtgagagttggggtcgtgcagttcagcaatgatgtcttcccagaattctatctgaaaacctacagatcccaggccccggtgctggacgccatacggcgcctgaggctcagaggggggtccccactgaacactggcaaggctctcgaatttgtggcaagaaacctctttgttaagtctgcggggagtcgcatagaagacggggtgccccaacacctggtcctggtcctgggtggaaaatcccaggacgatgtgtccaggttcgcccaggtgatccgttcctcgggcattgtgagtttaggggtaggagaccggaacatcgacagaacagagctgcagaccatcaccaatgaccccagactggtcttcacagtgcgagagttcagagagcttcccaacatagaagaaagaatcatgaactcgtttggaccctccgcagccactcctgcacctccaggggtggacacccctcctccttcacggccagagaagaagaaagcagacattgtgttcctgttggatggttccatcaacttcaggagggacagtttccaggaagtgcttcgttttgtgtctgaaatagtggacacagtttatgaagatggcgactccatccaagtggggcttgtccagtacaactctgaccccactgacgaattcttcctgaaggacttctctaccaagaggcagattattgacgccatcaacaaagtggtctacaaagggggaagacacgccaacactaaggtgggccttgagcacctgcgggtaaaccactttgtgcctgaggcaggcagccgcctggaccagcgggtccctcagattgcctttgtgatcacgggaggaaagtcggtggaagatgcacaggatgtgagcctggccctcacccagaggggggtcaaagtgtttgctgttggagtgaggaatatcgactcggaggaggttggaaagatagcgtccaacagcgccacagcgttccgcgtgggcaacgtccaggagctgtccgaactgagcgagcaagttttggaaactttgcatgatgcgatgcatgaaaccctttgccctggtgtaactgatgctgccaaagcttgtaatctggatgtgattctggggtttgatggttctagagaccagaatgtttttgtggcccagaagggcttcgagtccaaggtggacgccatcttgaacagaatcagccagatgcacagggtcagctgcagcggtggccgctcgcccaccgtgcgtgtgtcagtggtggccaacacgccctcgggcccggtggaggcctttgactttgacgagtaccagccagagatgctcgagaagttccggaacatgcgcagccagcacccctacgtcctcacggaggacaccctgaaggtctacctgaacaagttcagacagtcctcgccggacagcgtgaaggtggtcattcattttactgatggagcagacggagatctggctgatttacacagagcatctgagaacctccgccaagaaggagtccgtgccttgatcctggtgggccttgaacgagtggtcaacttggagcggctaatgcatctggagtttgggcgagggtttatgtatgacaggcccctgaggcttaacttgctggacttggattatgaactagcggagcagcttgacaacattgccgagaaagcttgctgtggggttccctgcaagtgctctgggcagaggggagaccgcgggcccatcggcagcatcgggccaaagggtattcctggagaagacggctaccgaggctatcctggtgatgagggtggacccggtgagcgtggtccgcctggtgtgaacggcactcaaggtttccagggctgcccgggccagagaggagtaaagggctctcggggattcccaggagagaagggcgaagtaggagaaattggactggatggtctggatggtgaagatggagacaaaggattgcctggttcttctggagagaaagggaatcctggaagaaggggtgataaaggacctcgaggagagaaaggagaaagaggagatgttgggattcgaggggacccgggtaacccaggacaagacagccaggagagaggacccaaaggagaaaccggtgacctcggccccatgggtgtcccagggagagatggagtacctggaggacctggagaaactgggaagaatggtggctttggccgaaggggaccccccggagctaagggcaacaagggcggtcctggccagccgggctttgagggagagcaggggaccagaggtgcacagggcccagctggtcctgctggtcctccagggctgataggagaacaaggcatttctggacctcggggaagcggaggtgccgctggtgctcctggagaacgaggcagaaccggtccactgggaagaaagggtgagcccggagagccaggaccaaaaggaggaatcgggaaccggggccctcgtggggagacgggagatgacgggagagacggagttggcagtgaaggacgcagaggcaaaaaaggagaaagaggattccctggatacccaggaccaaagggtaacccaggtgaacctgggctaaatggaacaacaggacccaaaggcatcagaggccgaaggggaaattcgggacctccagggatagttggacagaagggagaccctggctacccaggaccagctggtcccaagggcaacaggggcgactccatcgatcaatgtgccctcatccaaagcatcaaagataaatgcccttgctgttacgggcccctggagtgccccgtcttcccaacagaactagcctttgctttagacacctctgagggagtcaaccaagacactttcggccggatgcgagatgtggtcttgagtattgtgaatgacctgaccattgctgagagcaactgcccacggggggcccgggtggctgtggtcacctacaacaacgaggtgaccacggagatccggtttgctgactccaagaggaagtcggtcctcctggacaagattaagaaccttcaggtggctctgacatccaaacagcagagtctggagactgccatgtcgtttgtggccaggaacacatttaagcgtgtgaggaacggattcctaatgaggaaagtggctgttttcttcagcaacacacccacaagagcatccccacagctcagagaggctgtgctcaagctctcagatgcggggatcacccccttgttccttacaaggcaggaagaccggcagctcatcaacgctttgcagatcaataacacagcagtggggcatgcgcttgtcctgcctgcagggagagacctcacagacttcctggagaatgtcctcacgtgtcatgtttgcttggacatctgcaacatcgacccatcctgtggatttggcagttggaggccttccttcagggacaggagagcggcagggagcgatgtggacatcgacatggctttcatcttagacagcgctgagaccaccaccctgttccagttcaatgagatgaagaagtacatagcgtacctggtcagacaactggacatgagcccagatcccaaggcctcccagcacttcgccagagtggcagttgtgcagcacgcgccctctgagtccgtggacaatgccagcatgccacctgtgaaggtggaattctccctgactgactatggctccaaggagaagctggtggacttcctcagcaggggaatgacacagttgcagggaaccagggccttaggcagtgccattgaatacaccatagagaatgtctttgaaagtgccccaaacccacgggacctgaaaattgtggtcctgatgctgacgggcgaggtgccggagcagcagctggaggaggcccagagagtcatcctgcaggccaaatgcaagggctacttcttcgtggtcctgggcattggcaggaaggtgaacatcaaggaggtatacaccttcgccagtgagccaaacgacgtcttcttcaaattagtggacaagtccaccgagctcaacgaggagcctttgatgcgcttcgggaggctgttgccatccttcgtcagcagtgaaaatgctttttacttgtccccagatatcaggaaacagtgtgattggttccaaggggaccaacccacaaagaaccttgtgaagtttggtcacaaacaagtaaatgttccgaataacgttacttcaagtcctacatccaacccagtgacgacaacgaagccggtgactacgacgaagccggtgaccaccacaacaaagcctgtaaccaccacaacaaagcctgtgactattataaatcagccatctgtgaagccagccgctgcaaagccggcccctgcgaaacctgtggctgccaagcctgtggccacaaagatggccactgttagacccccagtggcggtgaagccagcaacggcagcgaagcctgtagcagcaaagccagcagctgtaagaccccccgctgctgctgctgcaaaaccagtggcgaccaagcctgaggtccctaggccacaggcagccaaaccagctgccaccaagccagccaccactaagcccatggttaagatgtcccgtgaagtccaggtgtttgagataacagagaacagcgccaaactccactgggagagggctgagccccccggtccttatttttatgacctcaccgtcacctcagcccatgatcagtccctggttctgaagcagaacctcacggtcacggaccgcgtcattggaggcctgctcgctgggcagacataccatgtggctgtggtctgctacctgaggtctcaggtcagagccacctaccacggaagtttcagtacaaagaaatctcagcccccacctccacagccagcaaggtcagcttctagttcaaccatcaatctaatggtgagcacagaaccattggctctcactgaaacagatatatgcaagttgccgaaagacgaaggaacttgcagggatttcatattaaaatggtactatgatccaaacaccaaaagctgtgcaagattctggtatggaggttgtggtggaaacgaaaacaaatttggatcacagaaagaatgtgaaaaggtttgcgctcctgtgctcgccaaacccggagtcatcagtgtgatgggaacctaagcgtgggtggccaacatcatatacctcttgaagaagaaggagtcagccatcgccaacttgtctctgtagaagctccgggtgtagattcccttgcactgtatcatttcatgctttgatttacactcgaactcgggagggaacatcctgctgcatgacctatcagtatggtgctaatgtgtctgtggaccctcgctctctgtctccaggcagttctctcgaatactttgaatgttgtgtaacagttagccactgctggtgtttatgtgaacattcctatcaatccaaattccctctggagtttcatgttatgcctgttgcaggcaaatgtaaagtctagaaaataatgcaaatgtcacggctactctatatacttttgcttggttcattttttttcccttttagttaagcatgactttagatgggaagcctgtgtatcgtggagaaacaagagaccaactttttcattccctgcccccaatttcccagactagatttcaagctaattttctttttctgaagcctctaacaaatgatctagttcagaaggaagcaaaatcccttaatctatgtgcaccgttgggaccaatgccttaattaaagaatttaaaaaagttgtaatagagaatatttttggcattcctctaatgttgtgtgttttttttttgtgtgtgctggagggaggggatttaattttaattttaaaatgtttaggaaatttatacaaagaaactttttaataaagtatattgaaagttaaaaaaaaaaaaaaaaaa

SEQ ID NO: 168 - DNA, 9944 bp, Homo sapiens
cagtttggagctcagtcttccaccaaaggccgttcagttctcctgggctccagcctcctgcaaggactgcaagagttttcctccgcagctctgagtctccacttttttggtggagaaaggctgcaaaaagaaaaagagacgcagtgagtgggaaaagtatgcatcctattcaaacctaattgaatcgaggagcccagggacacacgccttcaggtttgctcaggggttcatatttggtgcttagacaaattcaaaatgaggaaacatcggcacttgcccttagtggccgtcttttgcctctttctctcaggctttcctacaactcatgcccagcagcagcaagcagcacaagactctgctgacattattttccttattgatggatcaaacaacaccggaagtgtcaatttcgcagtcattctcgacttccttgtaaatctccttgagaaactcccaattggaactcagcagatccgagtgggggtggtccagtttagcgatgagcccagaaccatgttctccttggacacctactccaccaaggcccaggttctgggtgcagtgaaagccctcgggtttgctggtggggagttggccaatatcggcctcgcccttgatttcgtggtggagaaccacttcacccgggcagggggcagccgcgtggaggaaggggttccccaggtgctggtcctcataagtgccgggccttctagtgacgagattcgctacggggtggtagcactgaagcaggctagcgtgttctcattcggccttggagcccaggccgcctccagggcagagcttcagcacatagctaccgatgacaacttggtgtttactgtcccggaattccgtagctttggggacctccaggagaaattactgccgtacattgttggcgtggcccaaaggcacattgtcttgaaaccgccaaccattgtcacacaagtcattgaagtcaacaagagagacatagtcttcctggtggatggctcatctgcactgggactggccaacttcaatgccatccgagacttcattgctaaagtcatccagaggctggaaatcggacaggatcttatccaggtggcagtggcccagtatgcagacactgtgaggcctgaattttatttcaatacccatccaacaaaaagggaagtcataaccgctgtgcggaaaatgaagcccctggacggctcggccctgtacacgggctctgctctagactttgttcgtaacaacctattcacgagttcagccggctaccgggctgccgaggggattcctaagcttttggtgctgatcacaggtggtaagtccctagatgaaatcagccagcctgcccaggagctgaagagaagcagcataatggcctttgccattgggaacaagggtgccgatcaggctgagctggaagagatcgctttcgactcctccctggtgttcatcccagctgagttccgagccgccccattgcaaggcatgctgcctggcttgctggcacctctcaggaccctctctggaacccctgaagttcactcaaacaaaagggatatcatctttcttttggatggatcagccaacgttggaaaaaccaatttcccttatgtgcgcgactttgtaatgaacctagttaacagccttgatattggaaatgacaatattcgtgttggtttagtgcaatttagtgacactcctgtaacggagttctctttaaacacataccagaccaagtcagatatccttggtcatctgaggcagctgcagctccagggaggttcgggcctgaacacaggctcagccctaagctatgtctatgccaaccacttcacggaagctggcggcagcaggatccgtgaacacgtgccgcagctcctgcttctgctcacagctgggcagtctgaggactcctatttgcaagctgccaacgccttgacacgcgcgggcatcctgactttttgtgtgggagctagccaggcgaataaggcagagcttgagcagattgcttttaacccaagcctggtgtatctcatggatgatttcagctccctgccagctttgcctcagcagctgattcagcccctaaccacatatgttagtggaggtgtggaggaagtaccactcgctcagccagagagcaagcgagacattctgttcctctttgacggctcagccaatcttgtgggccagttccctgttgtccgtgactttctctacaagattatcgatgagctcaatgtgaagccagaggggacccgaattgcggtggctcagtacagcgatgatgtcaaggtggagtcccgttttgatgagcaccagagtaagcctgagatcctgaatcttgtgaagagaatgaagatcaagacgggcaaagccctcaacctgggctacgcgctggactatgcacagaggtacatttttgtgaagtctgctggcagccggatcgaggatggagtgcttcagttcctggtgctgctggtcgcaggaaggtcatctgaccgtgtggatgggccagcaagtaacctgaagcagagtggggttgtgcctttcatcttccaagccaagaacgcagaccctgctgagttagagcagatcgtgctgtctccagcgtttatcctggctgcagagtcgcttcccaagattggagatcttcatccacagatagtgaatctcttaaaatcagtgcacaacggagcaccagcaccagtttcaggtgaaaaggacgtggtgtttctgcttgatggctctgagggcgtcaggagcggcttccctctgttgaaagagtttgtccagagagtggtggaaagcctggatgtgggccaggaccgggtccgcgtggccgtggtgcagtacagcgaccggaccaggcccgagttctacctgaattcatacatgaacaagcaggacgtcgtcaacgctgtccgccagctgaccctgctgggagggccgacccccaacaccggggccgccctggagtttgtcctgaggaacatcctggtcagctctgcgggaagcaggataacagaaggtgtgccccagctgctgatcgtcctcacggccgacaggtctggggatgatgtgcggaacccctccgtggtcgtgaagaggggtggggctgtgcccattggcattggcatcgggaacgctgacatcacagagatgcagaccatctccttcatcccggactttgccgtggccattcccacctttcgccagctggggaccgtccaacaggtcatctctgagagggtgacccagctcacccgcgaggagctgagcaggctgcagccggtgttgcagcctctaccgagcccaggtgttggtggcaagagggacgtggtctttctcatcgatgggtcccaaagtgccgggcctgagttccagtacgttcgcaccctcatagagaggctggttgactacctggacgtgggctttgacaccacccgggtggctgtcatccagttcagcgatgaccccaaggtggagttcctgctgaacgcccattccagcaaggatgaagtgcagaacgcggtgcagcggctgaggcccaagggagggcggcagatcaacgtgggcaatgccctggagtacgtgtccaggaacatcttcaagaggcccctggggagccgcattgaagagggcgtcccgcagttcctggtcctcatctcgtctggaaagtctgacgatgaggtggacgacccggcggtggagctcaagcagtttggcgtggcccctttcacgatcgccaggaacgcagaccaggaggagctggtgaagatctcgctgagccccgaatatgtgttctcggtgagcaccttccgggagctgcccagcctggagcagaaactgctgacgcccatcacgaccctgacctcagagcagatccagaagctcttagccagcactcgctatccacctccagcagttgagagtgatgctgcagacattgtctttctgatcgacagctctgagggagttaggccagatggctttgcacatattcgagattttgttagcaggattgttcgaagactcaacatcggccccagtaaagtgagagttggggtcgtgcagttcagcaatgatgtcttcccagaattctatctgaaaacctacagatcccaggccccggtgctggacgccatacggcgcctgaggctcagaggggggtccccactgaacactggcaaggctctcgaatttgtggcaagaaacctctttgttaagtctgcggggagtcgcatagaagacggggtgccccaacacctggtcctggtcctgggtggaaaatcccaggacgatgtgtccaggttcgcccaggtgatccgttcctcgggcattgtgagtttaggggtaggagaccggaacatcgacagaacagagctgcagaccatcaccaatgaccccagactggtcttcacagtgcgagagttcagagagcttcccaacatagaagaaagaatcatgaactcgtttggaccctccgcagccactcctgcacctccaggggtggacacccctcctccttcacggccagagaagaagaaagcagacattgtgttcctgttggatggttccatcaacttcaggagggacagtttccaggaagtgcttcgttttgtgtctgaaatagtggacacagtttatgaagatggcgactccatccaagtggggcttgtccagtacaactctgaccccactgacgaattcttcctgaaggacttctctaccaagaggcagattattgacgccatcaacaaagtggtctacaaagggggaagacacgccaacactaaggtgggccttgagcacctgcgggtaaaccactttgtgcctgaggcaggcagccgcctggaccagcgggtccctcagattgcctttgtgatcacgggaggaaagtcggtggaagatgcacaggatgtgagcctggccctcacccagaggggggtcaaagtgtttgctgttggagtgaggaatatcgactcggaggaggttggaaagatagcgtccaacagcgccacagcgttccgcgtgggcaacgtccaggagctgtccgaactgagcgagcaagttttggaaactttgcatgatgcgatgcatgaaaccctttgccctggtgtaactgatgctgccaaagcttgtaatctggatgtgattctggggtttgatggttctagagaccagaatgtttttgtggcccagaagggcttcgagtccaaggtggacgccatcttgaacagaatcagccagatgcacagggtcagctgcagcggtggccgctcgcccaccgtgcgtgtgtcagtggtggccaacacgccctcgggcccggtggaggcctttgactttgacgagtaccagccagagatgctcgagaagttccggaacatgcgcagccagcacccctacgtcctcacggaggacaccctgaaggtctacctgaacaagttcagacagtcctcgccggacagcgtgaaggtggtcattcattttactgatggagcagacggagatctggctgatttacacagagcatctgagaacctccgccaagaaggagtccgtgccttgatcctggtgggccttgaacgagtggtcaacttggagcggctaatgcatctggagtttgggcgagggtttatgtatgacaggcccctgaggcttaacttgctggacttggattatgaactagcggagcagcttgacaacattgccgagaaagcttgctgtggggttccctgcaagtgctctgggcagaggggagaccgcgggcccatcggcagcatcgggccaaagggtattcctggagaagacggctaccgaggctatcctggtgatgagggtggacccggtgagcgtggtccgcctggtgtgaacggcactcaaggtttccagggctgcccgggccagagaggagtaaagggctctcggggattcccaggagagaagggcgaagtaggagaaattggactggatggtctggatggtgaagatggagacaaaggattgcctggttcttctggagagaaagggaatcctggaagaaggggtgataaaggacctcgaggagagaaaggagaaagaggagatgttgggattcgaggggacccgggtaacccaggacaagacagccaggagagaggacccaaaggagaaaccggtgacctcggccccatgggtgtcccagggagagatggagtacctggaggacctggagaaactgggaagaatggtggctttggccgaaggggaccccccggagctaagggcaacaagggcggtcctggccagccgggctttgagggagagcaggggaccagaggtgcacagggcccagctggtcctgctggtcctccagggctgataggagaacaaggcatttctggacctcggggaagcggaggtgccgctggtgctcctggagaacgaggcagaaccggtccactgggaagaaagggtgagcccggagagccaggaccaaaaggaggaatcgggaaccggggccctcgtggggagacgggagatgacgggagagacggagttggcagtgaaggacgcagaggcaaaaaaggagaaagaggattccctggatacccaggaccaaagggtaacccaggtgaacctgggctaaatggaacaacaggacccaaaggcatcagaggccgaaggggaaattcgggacctccagggatagttggacagaagggagaccctggctacccaggaccagctggtcccaagggcaacaggggcgactccatcgatcaatgtgccctcatccaaagcatcaaagataaatgcccttgctgttacgggcccctggagtgccccgtcttcccaacagaactagcctttgctttagacacctctgagggagtcaaccaagacactttcggccggatgcgagatgtggtcttgagtattgtgaatgacctgaccattgctgagagcaactgcccacggggggcccgggtggctgtggtcacctacaacaacgaggtgaccacggagatccggtttgctgactccaagaggaagtcggtcctcctggacaagattaagaaccttcaggtggctctgacatccaaacagcagagtctggagactgccatgtcgtttgtggccaggaacacatttaagcgtgtgaggaacggattcctaatgaggaaagtggctgttttcttcagcaacacacccacaagagcatccccacagctcagagaggctgtgctcaagctctcagatgcggggatcacccccttgttccttacaaggcaggaagaccggcagctcatcaacgctttgcagatcaataacacagcagtggggcatgcgcttgtcctgcctgcagggagagacctcacagacttcctggagaatgtcctcacgtgtcatgtttgcttggacatctgcaacatcgacccatcctgtggatttggcagttggaggccttccttcagggacaggagagcggcagggagcgatgtggacatcgacatggctttcatcttagacagcgctgagaccaccaccctgttccagttcaatgagatgaagaagtacatagcgtacctggtcagacaactggacatgagcccagatcccaaggcctcccagcacttcgccagagtggcagttgtgcagcacgcgccctctgagtccgtggacaatgccagcatgccacctgtgaaggtggaattctccctgactgactatggctccaaggagaagctggtggacttcctcagcaggggaatgacacagttgcagggaaccagggccttaggcagtgccattgaatacaccatagagaatgtctttgaaagtgccccaaacccacgggacctgaaaattgtggtcctgatgctgacgggcgaggtgccggagcagcagctggaggaggcccagagagtcatcctgcaggccaaatgcaagggctacttcttcgtggtcctgggcattggcaggaaggtgaacatcaaggaggtatacaccttcgccagtgagccaaacgacgtcttcttcaaattagtggacaagtccaccgagctcaacgaggagcctttgatgcgcttcgggaggctgttgccatccttcgtcagcagtgaaaatgctttttacttgtccccagatatcaggaaacagtgtgattggttccaaggggaccaacccacaaagaaccttgtgaagtttggtcacaaacaagtaaatgttccgaataacgttacttcaagtcctacatccaacccagtgacgacaacgaagccggtgactacgacgaagccggtgaccaccacaacaaagcctgtaaccaccacaacaaagcctgtgactattataaatcagccatctgtgaagccagccgctgcaaagccggcccctgcgaaacctgtggctgccaagcctgtggccacaaagatggccactgttagacccccagtggcggtgaagccagcaacggcagcgaagcctgtagcagcaaagccagcagctgtaagaccccccgctgctgctgctgcaaaaccagtggcgaccaagcctgaggtccctaggccacaggcagccaaaccagctgccaccaagccagccaccactaagcccatggttaagatgtcccgtgaagtccaggtgtttgagataacagagaacagcgccaaactccactgggagagggctgagccccccggtccttatttttatgacctcaccgtcacctcagcccatgatcagtccctggttctgaagcagaacctcacggtcacggaccgcgtcattggaggcctgctcgctgggcagacataccatgtggctgtggtctgctacctgaggtctcaggtcagagccacctaccacggaagtttcagtacaaagaaatctcagcccccacctccacagccagcaaggtcagcttctagttcaaccatcaatctaatggtgagcacagaaccattggctctcactgaaacagatatatgcaagttgccgaaagacgaaggaacttgcagggatttcatattaaaatggtactatgatccaaacaccaaaagctgtgcaagattctggtatggaggttgtggtggaaacgaaaacaaatttggatcacagaaagaatgtgaaaaggtttgcgctcctgtgctcgccaaacccggagtcatcagtgtgatgggaacctaagcgtgggtggccaacatcatatacctcttgaagaagaaggagtcagccatcgccaacttgtctctgtagaagctccgggtgtagattcccttgcactgtatcatttcatgctttgatttacactcgaactcgggagggaacatcctgctgcatgacctatcagtatggtgctaatgtgtctgtggaccctcgctctctgtctccaggcagttctctcgaatactttgaatgttgtgtaacagttagccactgctggtgtttatgtgaacattcctatcaatccaaattccctctggagtttcatgttatgcctgttgcaggcaaatgtaaagtctagaaaataatgcaaatgtcacggctactctatatacttttgcttggttcattttttttcccttttagttaagcatgactttagatgggaagcctgtgtatcgtggagaaacaagagaccaactttttcattccctgcccccaatttcccagactagatttcaagctaattttctttttctgaagcctctaacaaatgatctagttcagaaggaagcaaaatcccttaatctatgtgcaccgttgggaccaatgccttaattaaagaatttaaaaaagttgtaatagagaatatttttggcattcctctaatgttgtgtgttttttttttgtgtgtgctggagggaggggatttaattttaattttaaaatgtttaggaaatttatacaaagaaactttttaataaagtatattgaaagttaaaaaaaaaaaaaaaaaa

SEQ ID NO: 169 - DNA, 9959 bp, Homo sapiens
cagtttggagctcagtcttccaccaaaggccgttcagttctcctgggctccagcctcctgcaaggactgcaagagttttcctccgcagctctgagtctccacttttttggtggagaaaggctgcaaaaagaaaaagagacgcagtgagtgggaaaagtatgcatcctattcaaacctaattgaatcgaggagcccagggacacacgccttcaggtttgctcaggggttcatatttggtgcttagacaaattcaaaatgaggaaacatcggcacttgcccttagtggccgtcttttgcctctttctctcaggctttcctacaactcatgcccagcagcagcaagcagatgtcaaaaatggtgcggctgctgatataatatttctagtggattcctcttggaccattggagaggaacatttccaacttgttcgagagtttctatatgatgttgtaaaatccttagctgtgggagaaaatgatttccattttgctctggtccagttcaacggaaacccacataccgagttcctgttaaatacgtatcgtactaaacaagaagtcctttctcatatttccaacatgtcttatattgggggaaccaatcagactggaaaaggattagaatacataatgcaaagccacctcaccaaggctgctggaagccgggccggtgacggagtccctcaggttatcgtagtgttaactgatggacactcgaaggatggccttgctctgccctcagcggaacttaagtctgctgatgttaacgtgtttgcaattggagttgaggatgcagatgaaggagcgttaaaagaaatagcaagtgaaccgctcaatatgcatatgttcaacctagagaattttacctcacttcatgacatagtaggaaacttagtgtcctgtgtgcattcatccgtgagtccagaaagggctggggacacggaaacccttaaagacatcacagtcattgaagtcaacaagagagacatagtcttcctggtggatggctcatctgcactgggactggccaacttcaatgccatccgagacttcattgctaaagtcatccagaggctggaaatcggacaggatcttatccaggtggcagtggcccagtatgcagacactgtgaggcctgaattttatttcaatacccatccaacaaaaagggaagtcataaccgctgtgcggaaaatgaagcccctggacggctcggccctgtacacgggctctgctctagactttgttcgtaacaacctattcacgagttcagccggctaccgggctgccgaggggattcctaagcttttggtgctgatcacaggtggtaagtccctagatgaaatcagccagcctgcccaggagctgaagagaagcagcataatggcctttgccattgggaacaagggtgccgatcaggctgagctggaagagatcgctttcgactcctccctggtgttcatcccagctgagttccgagccgccccattgcaaggcatgctgcctggcttgctggcacctctcaggaccctctctggaacccctgaagttcactcaaacaaaagggatatcatctttcttttggatggatcagccaacgttggaaaaaccaatttcccttatgtgcgcgactttgtaatgaacctagttaacagccttgatattggaaatgacaatattcgtgttggtttagtgcaatttagtgacactcctgtaacggagttctctttaaacacataccagaccaagtcagatatccttggtcatctgaggcagctgcagctccagggaggttcgggcctgaacacaggctcagccctaagctatgtctatgccaaccacttcacggaagctggcggcagcaggatccgtgaacacgtgccgcagctcctgcttctgctcacagctgggcagtctgaggactcctatttgcaagctgccaacgccttgacacgcgcgggcatcctgactttttgtgtgggagctagccaggcgaataaggcagagcttgagcagattgcttttaacccaagcctggtgtatctcatggatgatttcagctccctgccagctttgcctcagcagctgattcagcccctaaccacatatgttagtggaggtgtggaggaagtaccactcgctcagccagagagcaagcgagacattctgttcctctttgacggctcagccaatcttgtgggccagttccctgttgtccgtgactttctctacaagattatcgatgagctcaatgtgaagccagaggggacccgaattgcggtggctcagtacagcgatgatgtcaaggtggagtcccgttttgatgagcaccagagtaagcctgagatcctgaatcttgtgaagagaatgaagatcaagacgggcaaagccctcaacctgggctacgcgctggactatgcacagaggtacatttttgtgaagtctgctggcagccggatcgaggatggagtgcttcagttcctggtgctgctggtcgcaggaaggtcatctgaccgtgtggatgggccagcaagtaacctgaagcagagtggggttgtgcctttcatcttccaagccaagaacgcagaccctgctgagttagagcagatcgtgctgtctccagcgtttatcctggctgcagagtcgcttcccaagattggagatcttcatccacagatagtgaatctcttaaaatcagtgcacaacggagcaccagcaccagtttcaggtgaaaaggacgtggtgtttctgcttgatggctctgagggcgtcaggagcggcttccctctgttgaaagagtttgtccagagagtggtggaaagcctggatgtgggccaggaccgggtccgcgtggccgtggtgcagtacagcgaccggaccaggcccgagttctacctgaattcatacatgaacaagcaggacgtcgtcaacgctgtccgccagctgaccctgctgggagggccgacccccaacaccggggccgccctggagtttgtcctgaggaacatcctggtcagctctgcgggaagcaggataacagaaggtgtgccccagctgctgatcgtcctcacggccgacaggtctggggatgatgtgcggaacccctccgtggtcgtgaagaggggtggggctgtgcccattggcattggcatcgggaacgctgacatcacagagatgcagaccatctccttcatcccggactttgccgtggccattcccacctttcgccagctggggaccgtccaacaggtcatctctgagagggtgacccagctcacccgcgaggagctgagcaggctgcagccggtgttgcagcctctaccgagcccaggtgttggtggcaagagggacgtggtctttctcatcgatgggtcccaaagtgccgggcctgagttccagtacgttcgcaccctcatagagaggctggttgactacctggacgtgggctttgacaccacccgggtggctgtcatccagttcagcgatgaccccaaggtggagttcctgctgaacgcccattccagcaaggatgaagtgcagaacgcggtgcagcggctgaggcccaagggagggcggcagatcaacgtgggcaatgccctggagtacgtgtccaggaacatcttcaagaggcccctggggagccgcattgaagagggcgtcccgcagttcctggtcctcatctcgtctggaaagtctgacgatgaggtggacgacccggcggtggagctcaagcagtttggcgtggcccctttcacgatcgccaggaacgcagaccaggaggagctggtgaagatctcgctgagccccgaatatgtgttctcggtgagcaccttccgggagctgcccagcctggagcagaaactgctgacgcccatcacgaccctgacctcagagcagatccagaagctcttagccagcactcgctatccacctccagcagttgagagtgatgctgcagacattgtctttctgatcgacagctctgagggagttaggccagatggctttgcacatattcgagattttgttagcaggattgttcgaagactcaacatcggccccagtaaagtgagagttggggtcgtgcagttcagcaatgatgtcttcccagaattctatctgaaaacctacagatcccaggccccggtgctggacgccatacggcgcctgaggctcagaggggggtccccactgaacactggcaaggctctcgaatttgtggcaagaaacctctttgttaagtctgcggggagtcgcatagaagacggggtgccccaacacctggtcctggtcctgggtggaaaatcccaggacgatgtgtccaggttcgcccaggtgatccgttcctcgggcattgtgagtttaggggtaggagaccggaacatcgacagaacagagctgcagaccatcaccaatgaccccagactggtcttcacagtgcgagagttcagagagcttcccaacatagaagaaagaatcatgaactcgtttggaccctccgcagccactcctgcacctccaggggtggacacccctcctccttcacggccagagaagaagaaagcagacattgtgttcctgttggatggttccatcaacttcaggagggacagtttccaggaagtgcttcgttttgtgtctgaaatagtggacacagtttatgaagatggcgactccatccaagtggggcttgtccagtacaactctgaccccactgacgaattcttcctgaaggacttctctaccaagaggcagattattgacgccatcaacaaagtggtctacaaagggggaagacacgccaacactaaggtgggccttgagcacctgcgggtaaaccactttgtgcctgaggcaggcagccgcctggaccagcgggtccctcagattgcctttgtgatcacgggaggaaagtcggtggaagatgcacaggatgtgagcctggccctcacccagaggggggtcaaagtgtttgctgttggagtgaggaatatcgactcggaggaggttggaaagatagcgtccaacagcgccacagcgttccgcgtgggcaacgtccaggagctgtccgaactgagcgagcaagttttggaaactttgcatgatgcgatgcatgaaaccctttgccctggtgtaactgatgctgccaaagcttgtaatctggatgtgattctggggtttgatggttctagagaccagaatgtttttgtggcccagaagggcttcgagtccaaggtggacgccatcttgaacagaatcagccagatgcacagggtcagctgcagcggtggccgctcgcccaccgtgcgtgtgtcagtggtggccaacacgccctcgggcccggtggaggcctttgactttgacgagtaccagccagagatgctcgagaagttccggaacatgcgcagccagcacccctacgtcctcacggaggacaccctgaaggtctacctgaacaagttcagacagtcctcgccggacagcgtgaaggtggtcattcattttactgatggagcagacggagatctggctgatttacacagagcatctgagaacctccgccaagaaggagtccgtgccttgatcctggtgggccttgaacgagtggtcaacttggagcggctaatgcatctggagtttgggcgagggtttatgtatgacaggcccctgaggcttaacttgctggacttggattatgaactagcggagcagcttgacaacattgccgagaaagcttgctgtggggttccctgcaagtgctctgggcagaggggagaccgcgggcccatcggcagcatcgggccaaagggtattcctggagaagacggctaccgaggctatcctggtgatgagggtggacccggtgagcgtggtccgcctggtgtgaacggcactcaaggtttccagggctgcccgggccagagaggagtaaagggctctcggggattcccaggagagaagggcgaagtaggagaaattggactggatggtctggatggtgaagatggagacaaaggattgcctggttcttctggagagaaagggaatcctggaagaaggggtgataaaggacctcgaggagagaaaggagaaagaggagatgttgggattcgaggggacccgggtaacccaggacaagacagccaggagagaggacccaaaggagaaaccggtgacctcggccccatgggtgtcccagggagagatggagtacctggaggacctggagaaactgggaagaatggtggctttggccgaaggggaccccccggagctaagggcaacaagggcggtcctggccagccgggctttgagggagagcaggggaccagaggtgcacagggcccagctggtcctgctggtcctccagggctgataggagaacaaggcatttctggacctcggggaagcggaggtgccgctggtgctcctggagaacgaggcagaaccggtccactgggaagaaagggtgagcccggagagccaggaccaaaaggaggaatcgggaaccggggccctcgtggggagacgggagatgacgggagagacggagttggcagtgaaggacgcagaggcaaaaaaggagaaagaggattccctggatacccaggaccaaagggtaacccaggtgaacctgggctaaatggaacaacaggacccaaaggcatcagaggccgaaggggaaattcgggacctccagggatagttggacagaagggagaccctggctacccaggaccagctggtcccaagggcaacaggggcgactccatcgatcaatgtgccctcatccaaagcatcaaagataaatgcccttgctgttacgggcccctggagtgccccgtcttcccaacagaactagcctttgctttagacacctctgagggagtcaaccaagacactttcggccggatgcgagatgtggtcttgagtattgtgaatgacctgaccattgctgagagcaactgcccacggggggcccgggtggctgtggtcacctacaacaacgaggtgaccacggagatccggtttgctgactccaagaggaagtcggtcctcctggacaagattaagaaccttcaggtggctctgacatccaaacagcagagtctggagactgccatgtcgtttgtggccaggaacacatttaagcgtgtgaggaacggattcctaatgaggaaagtggctgttttcttcagcaacacacccacaagagcatccccacagctcagagaggctgtgctcaagctctcagatgcggggatcacccccttgttccttacaaggcaggaagaccggcagctcatcaacgctttgcagatcaataacacagcagtggggcatgcgcttgtcctgcctgcagggagagacctcacagacttcctggagaatgtcctcacgtgtcatgtttgcttggacatctgcaacatcgacccatcctgtggatttggcagttggaggccttccttcagggacaggagagcggcagggagcgatgtggacatcgacatggctttcatcttagacagcgctgagaccaccaccctgttccagttcaatgagatgaagaagtacatagcgtacctggtcagacaactggacatgagcccagatcccaaggcctcccagcacttcgccagagtggcagttgtgcagcacgcgccctctgagtccgtggacaatgccagcatgccacctgtgaaggtggaattctccctgactgactatggctccaaggagaagctggtggacttcctcagcaggggaatgacacagttgcagggaaccagggccttaggcagtgccattgaatacaccatagagaatgtctttgaaagtgccccaaacccacgggacctgaaaattgtggtcctgatgctgacgggcgaggtgccggagcagcagctggaggaggcccagagagtcatcctgcaggccaaatgcaagggctacttcttcgtggtcctgggcattggcaggaaggtgaacatcaaggaggtatacaccttcgccagtgagccaaacgacgtcttcttcaaattagtggacaagtccaccgagctcaacgaggagcctttgatgcgcttcgggaggctgttgccatccttcgtcagcagtgaaaatgctttttacttgtccccagatatcaggaaacagtgtgattggttccaaggggaccaacccacaaagaaccttgtgaagtttggtcacaaacaagtaaatgttccgaataacgttacttcaagtcctacatccaacccagtgacgacaacgaagccggtgactacgacgaagccggtgaccaccacaacaaagcctgtaaccaccacaacaaagcctgtgactattataaatcagccatctgtgaagccagccgctgcaaagccggcccctgcgaaacctgtggctgccaagcctgtggccacaaagatggccactgttagacccccagtggcggtgaagccagcaacggcagcgaagcctgtagcagcaaagccagcagctgtaagaccccccgctgctgctgctgcaaaaccagtggcgaccaagcctgaggtccctaggccacaggcagccaaaccagctgccaccaagccagccaccactaagcccatggttaagatgtcccgtgaagtccaggtgtttgagataacagagaacagcgccaaactccactgggagagggctgagccccccggtccttatttttatgacctcaccgtcacctcagcccatgatcagtccctggttctgaagcagaacctcacggtcacggaccgcgtcattggaggcctgctcgctgggcagacataccatgtggctgtggtctgctacctgaggtctcaggtcagagccacctaccacggaagtttcagtacaaagaaatctcagcccccacctccacagccagcaaggtcagcttctagttcaaccatcaatctaatggtgagcacagaaccattggctctcactgaaacagatatatgcaagttgccgaaagacgaaggaacttgcagggatttcatattaaaatggtactatgatccaaacaccaaaagctgtgcaagattctggtatggaggttgtggtggaaacgaaaacaaatttggatcacagaaagaatgtgaaaaggtttgcgctcctgtgctcgccaaacccggagtcatcagtgtgatgggaacctaagcgtgggtggccaacatcatatacctcttgaagaagaaggagtcagccatcgccaacttgtctctgtagaagctccgggtgtagattcccttgcactgtatcatttcatgctttgatttacactcgaactcgggagggaacatcctgctgcatgacctatcagtatggtgctaatgtgtctgtggaccctcgctctctgtctccaggcagttctctcgaatactttgaatgttgtgtaacagttagccactgctggtgtttatgtgaacattcctatcaatccaaattccctctggagtttcatgttatgcctgttgcaggcaaatgtaaagtctagaaaataatgcaaatgtcacggctactctatatacttttgcttggttcattttttttcccttttagttaagcatgactttagatgggaagcctgtgtatcgtggagaaacaagagaccaactttttcattccctgcccccaatttcccagactagatttcaagctaattttctttttctgaagcctctaacaaatgatctagttcagaaggaagcaaaatcccttaatctatgtgcaccgttgggaccaatgccttaattaaagaatttaaaaaagttgtaatagagaatatttttggcattcctctaatgttgtgtgttttttttttgtgtgtgctggagggaggggatttaattttaattttaaaatgtttaggaaatttatacaaagaaactttttaataaagtatattgaaagttaaaaaaaaaaaaaaaaaa

SEQ ID NO: 170 - DNA, 1320 bp, Homo sapiens
ggcttctccctgcgcctgggactgcggccgcctctctaaatagcagccatgaggcgcctgggggcagtgtcctcgcgggccagcgacgggcaggacgccccgttcgcctagcgcgtgctcaggagttggtgtcctgcctgcgctcaggatgagggggaatctggccctggtgggcgttctaatcagcctggccttcctgtcactgctgccatctggacatcctcagccggctggcgatgacgcctgctctgtgcagatcctcgtccctggcctcaaaggggatgcgggagagaagggagacaaaggcgcccccggacggcctggaagagtcggccccacgggagaaaaaggagacatgggggacaaaggacagaaaggcagtgtgggtcgtcatggaaaaattggtcccattggctctaaaggtgagaaaggagattccggtgacataggaccccctggtcctaatggagaaccaggcctcccatgtgagtgcagccagctgcgcaaggccatcggggagatggacaaccaggtctctcagctgaccagcgagctcaagttcatcaagaatgctgtcgccggtgtgcgcgagacggagagcaagatctacctgctggtgaaggaggagaagcgctacgcggacgcccagctgtcctgccagggccgcgggggcacgctgagcatgcccaaggacgaggctgccaatggcctgatggccgcatacctggcgcaagccggcctggcccgtgtcttcatcggcatcaacgacctggagaaggagggcgccttcgtgtactctgaccactcccccatgcggaccttcaacaagtggcgcagcggtgagcccaacaatgcctacgacgaggaggactgcgtggagatggtggcctcgggcggctggaacgacgtggcctgccacaccaccatgtacttcatgtgtgagtttgacaaggagaacatgtgagcctcaggctggggctgcccattgggggccccacatgtccctgcagggttggcagggacagagcccagaccatggtgccagccagggagctgtccctctgtgaagggtggaggctcactgagtagagggctgttgtctaaactgagaaaatggcctatgcttaagaggaaaatgaaagtgttcctggggtgctgtctctgaagaagcagagtttcattacctgtattgtagccccaatgtcattatgtaattattacccagaattgctcttccataaagcttgtgcctttgtccaagctatacaataaaatctttaagtagtgcagtagttaagtccaaaaaaaaaaaaaaaaaaa

SEQ ID NO: 171 - DNA, 1633 bp, Homo sapiens
aaagaagaaccatgaggctcatcctgcctgtgggtttgattgctaccactcttgcaattgctcctgtccgctttgacagggagaaggtgttccgcgtgaagccccaggatgaaaaacaagcagacatcataaaggacttggccaaaaccaatgagcttgacttctggtatccaggtgccacccaccacgtagctgctaatatgatggtggatttccgagttagtgagaaggaatcccaagccatccagtctgccttggatcaaaataaaatgcactatgaaatcttgattcatgatctacaagaagagattgagaaacagtttgatgttaaagaagatatcccaggcaggcacagctacgcaaaatacaataattgggaaaagattgtggcttggactgaaaagatgatggataagtatcctgaaatggtctctcgtattaaaattggatctactgttgaagataatccactatatgttctgaagattggggaaaagaatgaaagaagaaaggctatttttatggattgtggcattcacgcacgagaatgggtctccccagcattctgccagtggtttgtctatcaggcaaccaaaacttatgggagaaacaaaattatgaccaaactcttggaccgaatgaatttttacattcttcctgtgttcaatgttgatggatatatttggtcatggacaaagaaccgcatgtggagaaaaaatcgttccaagaaccaaaactccaaatgcatcggcactgacctcaacaggaattttaatgcttcatggaactccattcctaacaccaatgacccatgtgcagataactatcggggctctgcaccagagtccgagaaagagacgaaagctgtcactaatttcattagaagccacctgaatgaaatcaaggtttacatcaccttccattcctactcccagatgctattgtttccctatggatatacatcaaaactgccacctaaccatgaggacttggccaaagttgcaaagattggcactgatgttctatcaactcgatatgaaacccgctacatctatggcccaatagaatcaacaatttacccgatatcaggttcttctttagactgggcttatgacctgggcatcaaacacacatttgcctttgagctccgagataaaggcaaatttggttttctccttccagaatcccggataaagccaacgtgcagagagaccatgctagctgtcaaatttattgccaagtatatcctcaagcatacttcctaaagaactgccctctgtttggaataagccaattaatccttttttgtgcctttcatcagaaagtcaatcttcagttatccccaaatgcagcttctatttcacctgaatccttctcttgctcatttaagtcccatgttactgctgtttgcttttacttactttcagtagcaccataacgaagtagctttaagtgaaaccttttaactacctttctttgctccaagtgaagtttggacccagcagaaagcattattttgaaaggtgatatacagtggggcacagaaaacaaatgaaaaccctcagtttctcacagattttcaccatgtggcttcatcaatttatgtgctaatacaataaaataaaatgcactt

SEQ ID NO: 172 - DNA, 4914 bp, Homo sapiens; identical to SEQ ID NO: 138

SEQ ID NO: 173 - DNA, 2625 bp, Homo sapiens
gaaggacgtggggacacgggccagagtggctggccccacgcacggacaggagtgaacccgagctgtgccgaccaacccccaggatggcggaagctcaccaggccgtggccttccagttcacggtgaccccagacggggtcgacttccggctcagtcgggaggccctgaaacacgtctacctgtctgggatcaactcctggaagaaacgcctgatccgcatcaagaatggcatcctcaggggcgtgtaccctggcagccccaccagctggctggtcgtcatcatggcaacagtgggttcctccttctgcaacgtggacatctccttggggctggtcagttgcatccagagatgcctccctcaggggtgtggcccctaccagaccccgcagacccgggcacttctcagcatggccatcttctccacgggcgtctgggtgacgggcatcttcttcttccgccaaaccctgaagctgcttctctgctaccatgggtggatgtttgagatgcatggcaagaccagcaacttgaccaggatctgggctatgtgtatccgccttctatccagccggcaccctatgctctacagcttccagacatctctgcccaagcttcctgtgcccagggtgtcagccacaattcagcggtacctagagtctgtgcgccccttgttggatgatgaggaatattaccgcatggagttgctggccaaagaattccaggacaagactgcccccaggctgcagaaatacctggtgctcaagtcatggtgggcaagtaactatgtgagtgactggtgggaagagtacatctaccttcgaggcaggagccctctcatggtgaacagcaactattatgtcatggaccttgtgctcatcaagaatacagacgtgcaggcagcccgcctgggaaacatcatccacgccatgatcatgtatcgccgtaaactggaccgtgaagaaatcaagcctgtgatggcactgggcatagtgcctatgtgctcctaccagatggagaggatgttcaacaccactcggatcccgggcaaggacacagatgtgctacagcacctctcagacagccggcacgtggctgtctaccacaagggacgcttcttcaagctgtggctctatgagggcgcccgtctgctcaagcctcaggatctggagatgcagttccagaggatcctggacgacccctccccacctcagcctggggaggagaagctggcagccctcactgcaggaggaagggtggagtgggcgcaggcacgccaggccttctttagctctggaaagaataaggctgccttggaggccatcgagcgtgccgctttcttcgtggccctggatgaggaatcctactcctatgaccccgaagatgaggccagcctcagcctctatggcaaggccctgctacatggcaactgctacaacaggtggtttgacaaatccttcactctcatttccttcaagaatggccagttgggtctcaatgcagagcatgcgtgggcagatgctcccatcattgggcacctctgggagtttgtcctgggcacagacagcttccacctgggctacacggagaccgggcactgcctgggcaaaccgaaccctgcgctcgcacctcctacacggctgcagtgggacattccaaaacagtgccaggcggtcatcgagagttcctaccaggtggccaaggcgttggcagacgacgtggagttgtactgcttccagttcctgccctttggcaaaggcctcatcaagaagtgccggaccagccctgatgcctttgtgcagatcgcgctgcagctggctcacttccgggacaggggtaagttctgcctgacctatgaggcctcaatgaccagaatgttccgggagggacggactgagactgtgcgttcctgtaccagcgagtccacagcctttgtgcaggccatgatggaggggtcccacacaaaagcagacctgcgagatctcttccagaaggctgctaagaagcaccagaatatgtaccgcctggccatgaccggggcagggatcgacaggcacctcttctgcctttacttggtctccaagtacctaggagtcagctctcctttccttgctgaggtgctctcggaaccctggcgtctctccaccagccagatcccccaatcccagatccgcatgttcgacccagagcagcaccccaatcacctgggcgctggaggtggctttggccctgtagcagatgatggctatggagtttcctacatgattgcaggcgagaacacgatcttcttccacatctccagcaagttctcaagctcagagacgaacgcccagcgctttggaaaccacatccgcaaagccctgctggacattgctgatcttttccaagttcccaaggcctacagctgaagcccttaggtacctgtgttttgtttgggaactcggaggccctccccctcccccagctcagaccacagaggtggcaagagaagggctgaagctggaagactgttcatgagggacttgtgtgacctgctttgaaatgtgtgactctgctgagtgacgtaggctctgagatagctgtccacgcccacgtgtttgcttggaataaatacttgcctcagaaccttca

SEQ ID NO: 174 - DNA, 2879 bp, Homo sapiens
gaaggacgtggggacacgggccagagtggctggccccacgcacggacaggagtgaacccgagctgtgccgaccaacccccaggatggcggaagctcaccaggccgtggccttccagttcacggtgaccccagacggggtcgacttccggctcagtcgggaggccctgaaacacgtctacctgtctgggatcaactcctggaagaaacgcctgatccgcatcaagaatggcatcctcaggggcgtgtaccctggcagccccaccagctggctggtcgtcatcatggcaacagtgggttcctccttctgcaacgtggacatctccttggggctggtcagttgcatccagagatgcctccctcaggggtgtggcccctaccagaccccgcagacccgggcacttctcagcatggccatcttctccacgggcgtctgggtgacgggcatcttcttcttccgccaaaccctgaagctgcttctctgctaccatgggtggatgtttgagatgcatggcaagaccagcaacttgaccaggatctgggctatgtgtatccgccttctatccagccggcaccctatgctctacagcttccagacatctctgcccaagcttcctgtgcccagggtgtcagccacaattcagcggtacctagagtctgtgcgccccttgttggatgatgaggaatattaccgcatggagttgctggccaaagaattccaggacaagactgcccccaggctgcagaaatacctggtgctcaagtcatggtgggcaagtaactatgtgagtgactggtgggaagagtacatctaccttcgaggcaggagccctctcatggtgaacagcaactattatgtcatggaccttgtgctcatcaagaatacagacgtgcaggcagcccgcctgggaaacatcatccacgccatgatcatgtatcgccgtaaactggaccgtgaagaaatcaagcctgtgatggcactgggcatagtgcctatgtgctcctaccagatggagaggatgttcaacaccactcggatcccgggcaaggacacagatgtgctacagcacctctcagacagccggcacgtggctgtctaccacaagggacgcttcttcaagctgtggctctatgagggcgcccgtctgctcaagcctcaggatctggagatgcagttccagaggatcctggacgacccctccccacctcagcctggggaggagaagctggcagccctcactgcaggaggaagggtggagtgggcgcaggcacgccaggccttctttagctctggaaagaataaggctgccttggaggccatcgagcgtgccgctttcttcgtggccctggatgaggaatcctactcctatgaccccgaagatgaggccagcctcagcctctatggcaaggccctgctacatggcaactgctacaacaggtggtttgacaaatccttcactctcatttccttcaagaatggccagttgggtctcaatgcagagcatgcgtgggcagatgctcccatcattgggcacctctgggagtttgtcctgggcacagacagcttccacctgggctacacggagaccgggcactgcctgggcaaaccgaaccctgcgctcgcacctcctacacggctgcagtgggacattccaaaacagtgccaggcggtcatcgagagttcctaccaggtggccaaggcgttggcagacgacgtggagttgtactgcttccagttcctgccctttggcaaaggcctcatcaagaagtgccggaccagccctgatgcctttgtgcagatcgcgctgcagctggctcacttccgggacaggggtaagttctgcctgacctatgaggcctcaatgaccagaatgttccgggagggacggactgagactgtgcgttcctgtaccagcgagtccacagcctttgtgcaggccatgatggaggggtcccacacaaaagcagacctgcgagatctcttccagaaggctgctaagaagcaccagaatatgtaccgcctggccatgaccggggcagggatcgacaggcacctcttctgcctttacttggtctccaagtacctaggagtcagctctcctttccttgctgaggtgctctcggaaccctggcgtctctccaccagccagatcccccaatcccagatccgcatgttcgacccagagcagcaccccaatcacctgggcgctggaggtggctttggccctgtagcagatgatggctatggagtttcctacatgattgcaggcgagaacacgatcttcttccacatctccagcaagttctcaagctcagagacgaacgcccagcgctttggaaaccacatccgcaaagccctgctggacattgctgatcttttccaagttcccaaggcctacagctgaaggttggagaaatgccagctgccctttcgtccccacactgtggaggaagggacctgtggcagctcacaggcatgaggggtggccgtgcacaggtgcccaggctccaaggacagctccggcagcaggtcctcgctgggcagatgctgctccctgagggcccaggtggtggaggtggggttggagcaggaagggaattttgatttttttttttcttgatagatactaataaaaataaggctgtgtaattttctctcagcccttaggtacctgtgttttgtttgggaactcggaggccctccccctcccccagctcagaccacagaggtggcaagagaagggctgaagctggaagactgttcatgagggacttgtgtgacctgctttgaaatgtgtgactctgctgagtgacgtaggctctgagatagctgtccacgcccacgtgtttgcttggaataaatacttgcctcagaaccttca

SEQ ID NO: 175 - DNA, 2834 bp, Homo sapiens
gcaattcccaccgcggaaggtgccgaccaacccccaggatggcggaagctcaccaggccgtggccttccagttcacggtgaccccagacggggtcgacttccggctcagtcgggaggccctgaaacacgtctacctgtctgggatcaactcctggaagaaacgcctgatccgcatcaagaatggcatcctcaggggcgtgtaccctggcagccccaccagctggctggtcgtcatcatggcaacagtgggttcctccttctgcaacgtggacatctccttggggctggtcagttgcatccagagatgcctccctcaggggtgtggcccctaccagaccccgcagacccgggcacttctcagcatggccatcttctccacgggcgtctgggtgacgggcatcttcttcttccgccaaaccctgaagctgcttctctgctaccatgggtggatgtttgagatgcatggcaagaccagcaacttgaccaggatctgggctatgtgtatccgccttctatccagccggcaccctatgctctacagcttccagacatctctgcccaagcttcctgtgcccagggtgtcagccacaattcagcggtacctagagtctgtgcgccccttgttggatgatgaggaatattaccgcatggagttgctggccaaagaattccaggacaagactgcccccaggctgcagaaatacctggtgctcaagtcatggtgggcaagtaactatgtgagtgactggtgggaagagtacatctaccttcgaggcaggagccctctcatggtgaacagcaactattatgtcatggaccttgtgctcatcaagaatacagacgtgcaggcagcccgcctgggaaacatcatccacgccatgatcatgtatcgccgtaaactggaccgtgaagaaatcaagcctgtgatggcactgggcatagtgcctatgtgctcctaccagatggagaggatgttcaacaccactcggatcccgggcaaggacacagatgtgctacagcacctctcagacagccggcacgtggctgtctaccacaagggacgcttcttcaagctgtggctctatgagggcgcccgtctgctcaagcctcaggatctggagatgcagttccagaggatcctggacgacccctccccacctcagcctggggaggagaagctggcagccctcactgcaggaggaagggtggagtgggcgcaggcacgccaggccttctttagctctggaaagaataaggctgccttggaggccatcgagcgtgccgctttcttcgtggccctggatgaggaatcctactcctatgaccccgaagatgaggccagcctcagcctctatggcaaggccctgctacatggcaactgctacaacaggtggtttgacaaatccttcactctcatttccttcaagaatggccagttgggtctcaatgcagagcatgcgtgggcagatgctcccatcattgggcacctctgggagtttgtcctgggcacagacagcttccacctgggctacacggagaccgggcactgcctgggcaaaccgaaccctgcgctcgcacctcctacacggctgcagtgggacattccaaaacagtgccaggcggtcatcgagagttcctaccaggtggccaaggcgttggcagacgacgtggagttgtactgcttccagttcctgccctttggcaaaggcctcatcaagaagtgccggaccagccctgatgcctttgtgcagatcgcgctgcagctggctcacttccgggacaggggtaagttctgcctgacctatgaggcctcaatgaccagaatgttccgggagggacggactgagactgtgcgttcctgtaccagcgagtccacagcctttgtgcaggccatgatggaggggtcccacacaaaagcagacctgcgagatctcttccagaaggctgctaagaagcaccagaatatgtaccgcctggccatgaccggggcagggatcgacaggcacctcttctgcctttacttggtctccaagtacctaggagtcagctctcctttccttgctgaggtgctctcggaaccctggcgtctctccaccagccagatcccccaatcccagatccgcatgttcgacccagagcagcaccccaatcacctgggcgctggaggtggctttggccctgtagcagatgatggctatggagtttcctacatgattgcaggcgagaacacgatcttcttccacatctccagcaagttctcaagctcagagacgaacgcccagcgctttggaaaccacatccgcaaagccctgctggacattgctgatcttttccaagttcccaaggcctacagctgaaggttggagaaatgccagctgccctttcgtccccacactgtggaggaagggacctgtggcagctcacaggcatgaggggtggccgtgcacaggtgcccaggctccaaggacagctccggcagcaggtcctcgctgggcagatgctgctccctgagggcccaggtggtggaggtggggttggagcaggaagggaattttgatttttttttttcttgatagatactaataaaaataaggctgtgtaattttctctcagcccttaggtacctgtgttttgtttgggaactcggaggccctccccctcccccagctcagaccacagaggtggcaagagaagggctgaagctggaagactgttcatgagggacttgtgtgacctgctttgaaatgtgtgactctgctgagtgacgtaggctctgagatagctgtccacgcccacgtgtttgcttggaataaatacttgcctcagaaccttca

SEQ ID NO: 176 - DNA, 1779 bp, Homo sapiens
gtgactgggtggggctgcctcacttctgcctgatttgggaagcgctgcaaggacaaccggctggggtccttgcgcgccgcggctcagggaggagcaccgactgcgccgcgtaagtgccgcctgccctgcgtgggtcgtgccagctcagcgggacaggtcctcgcctcggtccctcggacttagggagcgcggggcagaccctgagagatggttggtgccatgtggaaggtgattgtttcgctggtcctgttgatgcctggcccctgtgatgggctgtttcgctccctatacagaagtgtttccatgccacctaagggagactcaggacagccattatttctcaccccttacattgaagctgggaagatccaaaaaggaagagaattgagtttggtcggccctttcccaggactgaacatgaagagttatgccggcttcctcaccgtgaataagacttacaacagcaacctcttcttctggttcttcccagctcagatacagccagaagatgccccagtagttctctggctacagggtgggccgggaggttcatccatgtttggactctttgtggaacatgggccttatgttgtcacaagtaacatgaccttgcgtgacagagacttcccctggaccacaacgctctccatgctttacattgacaatccagtgggcacaggcttcagttttactgatgatacccacggatatgcagtcaatgaggacgatgtagcacgggatttatacagtgcactaattcagtttttccagatatttcctgaatataaaaataatgacttttatgtcactggggagtcttatgcagggaaatatgtgccagccattgcacacctcatccattccctcaaccctgtgagagaggtgaagatcaacctgaacggaattgctattggagatggatattctgatcccgaatcaattatagggggctatgcagaattcctgtaccaaattggcttgttggatgagaagcaaaaaaagtacttccagaagcagtgccatgaatgcatagaacacatcaggaagcagaactggtttgaggcctttgaaatactggataaactactagatggcgacttaacaagtgatccttcttacttccagaatgttacaggatgtagtaattactataactttttgcggtgcacggaacctgaggatcagctttactatgtgaaatttttgtcactcccagaggtgagacaagccatccacgtggggaatcagacttttaatgatggaactatagttgaaaagtacttgcgagaagatacagtacagtcagttaagccatggttaactgaaatcatgaataattataaggttctgatctacaatggccaactggacatcatcgtggcagctgccctgacagagcgctccttgatgggcatggactggaaaggatcccaggaatacaagaaggcagaaaaaaaagtttggaagatctttaaatctgacagtgaagtggctggttacatccggcaagcgggtgacttccatcaggtaattattcgaggtggaggacatattttaccctatgaccagcctctgagagcttttgacatgattaatcgattcatttatggaaaaggatgggatccttatgttggataaactaccttcccaaaagagaacatcagaggttttcattgctgaaaagaaaatcgtaaaaacagaaaatgtcataggaataaaaaaattatcttttcatatctgcaagatttttttcatcaataaaaattatccttgaaacaa

SEQ ID NO: 177 - DNA, 1691 bp, Homo sapiens
gtgactgggtggggctgcctcacttctgcctgatttgggaagcgctgcaaggacaaccggctggggtccttgcgcgccgcggctcagggaggagcaccgactgcgccgcaccctgagagatggttggtgccatgtggaaggtgattgtttcgctggtcctgttgatgcctggcccctgtgatgggctgtttcgctccctatacagaagtgtttccatgccacctaagggagactcaggacagccattatttctcaccccttacattgaagctgggaagatccaaaaaggaagagaattgagtttggtcggccctttcccaggactgaacatgaagagttatgccggcttcctcaccgtgaataagacttacaacagcaacctcttcttctggttcttcccagctcagatacagccagaagatgccccagtagttctctggctacagggtgggccgggaggttcatccatgtttggactctttgtggaacatgggccttatgttgtcacaagtaacatgaccttgcgtgacagagacttcccctggaccacaacgctctccatgctttacattgacaatccagtgggcacaggcttcagttttactgatgatacccacggatatgcagtcaatgaggacgatgtagcacgggatttatacagtgcactaattcagtttttccagatatttcctgaatataaaaataatgacttttatgtcactggggagtcttatgcagggaaatatgtgccagccattgcacacctcatccattccctcaaccctgtgagagaggtgaagatcaacctgaacggaattgctattggagatggatattctgatcccgaatcaattatagggggctatgcagaattcctgtaccaaattggcttgttggatgagaagcaaaaaaagtacttccagaagcagtgccatgaatgcatagaacacatcaggaagcagaactggtttgaggcctttgaaatactggataaactactagatggcgacttaacaagtgatccttcttacttccagaatgttacaggatgtagtaattactataactttttgcggtgcacggaacctgaggatcagctttactatgtgaaatttttgtcactcccagaggtgagacaagccatccacgtggggaatcagacttttaatgatggaactatagttgaaaagtacttgcgagaagatacagtacagtcagttaagccatggttaactgaaatcatgaataattataaggttctgatctacaatggccaactggacatcatcgtggcagctgccctgacagagcgctccttgatgggcatggactggaaaggatcccaggaatacaagaaggcagaaaaaaaagtttggaagatctttaaatctgacagtgaagtggctggttacatccggcaagcgggtgacttccatcaggtaattattcgaggtggaggacatattttaccctatgaccagcctctgagagcttttgacatgattaatcgattcatttatggaaaaggatgggatccttatgttggataaactaccttcccaaaagagaacatcagaggttttcattgctgaaaagaaaatcgtaaaaacagaaaatgtcataggaataaaaaaattatcttttcatatctgcaagatttttttcatcaataaaaattatccttgaaacaa

SEQ ID NO: 178 - DNA, 4572 bp, Homo sapiens
cggctgctcccattgagctgtctgctcgctgtgcccgctgtgcctgctgtgcccgcgctgtcgccgctgctaccgcgtctgctggacgcgggagacgccagcgagctggtgattggagccctgcggagagctcaagcgcccagctctgcccgaggagcccaggctgccccgtgagtcccatagttgctgcaggagtggagccatgagctgcgtcctgggtggtgtcatccccttggggctgctgttcctggtctgcggatcccaaggctacctcctgcccaacgtcactctcttagaggagctgctcagcaaataccagcacaacgagtctcactcccgggtccgcagagccatccccagggaggacaaggaggagatcctcatgctgcacaacaagcttcggggccaggtgcagcctcaggcctccaacatggagtacatgacctgggatgacgaactggagaagtctgctgcagcgtgggccagtcagtgcatctgggagcacgggcccaccagtctgctggtgtccatcgggcagaacctgggcgctcactggggcaggtatcgctctccggggttccatgtgcagtcctggtatgacgaggtgaaggactacacctacccctacccgagcgagtgcaacccctggtgtccagagaggtgctcggggcctatgtgcacgcactacacacagatagtttgggccaccaccaacaagatcggttgtgctgtgaacacctgccggaagatgactgtctggggagaagtttgggagaacgcggtctactttgtctgcaattattctccaaaggggaactggattggagaagccccctacaagaatggccggccctgctctgagtgcccacccagctatggaggcagctgcaggaacaacttgtgttaccgagaagaaacctacactccaaaacctgaaacggacgagatgaatgaggtggaaacggctcccattcctgaagaaaaccatgtttggctccaaccgagggtgatgagacccaccaagcccaagaaaacctctgcggtcaactacatgacccaagtcgtcagatgtgacaccaagatgaaggacaggtgcaaagggtccacgtgtaacaggtaccagtgcccagcaggctgcctgaaccacaaggcgaagatctttggaactctgttctatgaaagctcgtctagcatatgccgcgccgccatccactacgggatcctggatgacaagggaggcctggtggatatcaccaggaacgggaaggtccccttcttcgtgaagtctgagagacacggcgtgcagtccctcagcaaatacaaaccttccagctcattcatggtgtcaaaagtgaaagtgcaggatttggactgctacacgaccgttgctcagctgtgcccgtttgaaaagccagcaactcactgcccaagaatccattgtccggcacactgcaaagacgaaccttcctactgggctccggtgtttggaaccaacatctatgcagatacctcaagcatctgcaagacagccgtgcacgcgggagtcatcagcaacgagagtgggggtgacgtggacgtgatgcccgtggataaaaagaagacctacgtgggctcgctcaggaatggagttcagtctgaaagcctggggactcctcgggatggaaaggccttccggatctttgctgtcaggcagtgaatttccagcaccaggggagaaggggcgtcttcaggagggcttcggggttttgcttttatttttattttgtcattgcggggtatatggagagtcaggaaacttcctttgactgatgttcagtgtccatcactttgtggcctgtgggtgaggtgacatctcatcccctcactgaagcaacagcatcccaaggtgctcagccggactccctggtgcctgatcctgctggggcccgggggtctccatctggacgtcctctctcctttagagatctgagctgtctcttaaaggggacagttgcccaaaatgttccttgctatgtgttcttctgttggtggaggaagttgatttcaacctccctgccaaaagaacaaaccatttgaagctcacaattgtgaagcattcacggcgtcggaagaggccttttgagcaagcgccaatgagtttcaggaatgaagtagaaggtagttatttaaaaataaaaaacacagtccgtccctaccaatagaggaaaatggttttaatgtttgctggtcagacagacaaatgggctagagtaagagggctgcgggtatgagagaccccggctccgccctggcacgtgtccttgctggcggcccgccacaggcccccttcaatggccgcattcaggatggctctatacacagcagtgctggtttatgtagagttcagcagtcacttcagagatgtatcttgtctttgtcaggcccttcatcttcatggcccacctgttttctgccgtgacctttggtcccattgaggactaaggatcgggaccctttctttaccccctacccattgtggctcccaccctgcctcggactggtttacgtgtcctggttcacacccaggacttttctttgcaagcgaacctgtttgaagcccaagtcttaactcctggtctcgtaaggttccactgagacgagatgtctgagaacaaccaaagaaggcctgctctttgctgcttttaaaaaatgacaattaaatgtgcagattccccacgcacccgatgacctattttttcagccgtgggaggaatggagtctttggtacattcctcaccgaggttagcagctcagtttgtggttatgaaaccgtctgtggcctcatgacagcgagagatgggaatacactagaaggatctcttttcctgttttcgtgaaacgactcttgccaaacgttcccgaggcgccaaggagtgtagtacaccctggctgccatcactctataaaagtgcttcatgagcccagaccaaaagcccacagtgaaatgaagtacccttttgtaaatagcatttttttgcagaaggtgaaaattccactctctaccaccgggccagccaatagatcactttggtgaatgctagtttcaaatttgattcaaaatatttcttaggtgaaagaactagcagaaagtcaaaaactaagatactgtagactggacaagaaattctacctgggcacctaggtgatgccttctttctttgattgcctttctaataaatgcagaatctgaaggtaaataggtttaaaacaaaacaaaaacccacccctttaaggagttggtaaaaagcagttcaactcttagcttgactgagctaaaattcacaggactacgtgctttgtgcattgtagtctagtcgtaattcataggtactgactcctcagccccaaatgtcggagaggaagaattcggtcagcctgtcaggtcgtgagtccagttaccaccaaacatctgggaaacttctgggtgctgggtgctctgctgctggacttttgtggctgtgtctgtgtctgcaagataaattagatcgccctgtggggtttgcagaattagtgaagggtccaggacgatcccagtgggctcgcttccaaagcatcccactcaagggagacttgaaacttccagtgtgagttgaccccatcatttaaaaataaagtccccgggttccttaatgcctccttcactgggccttcctagcaggatagaaagtccttgcccagagcaggacctggctgtctttttttttttttttttcccgagaccaagtttcactctgttgcccaaggtagagtgcagtggcgtgatctctgctcattgcaactgccgcctcccgggttcaagcaattctcatgcatcagcctcccaagtacctgggactacaggcgtgagctaccatgcccggctaatttttgtatttttagtagagatggggtttcattatgttggccaggctggtctcgaactccttacctcaggtgatccacccaccttggcctcccgaagtgctgggattacaggcatgagccactgcgcccggccatggacctggctgtctttatcatccccacaaacattttgaaactggaatatttgtcttcagaaaatggaaacaagactataaatgataagccctgtccctagcaccacctctcctgtgtgtggaatagaggcccctcgtgctaccaacacttaccctgtgtttaaaaagatcttgtaccaagccaacggcgttcctggctctcctgcccacaggatgaacattttcggcttccttaggagttttgccctaccgtattccaaagcgtgtgctggtttctcatattgtctgtaggctcactcagcccgcagtttatgtgtgtgcttttttctatgaaaaatgatgtattttgctacttcctgtgtacaaagttttattgtaaatgttttttgtgctttgcatgaacaggggccacgttgttgcaattgtttcagtagaactggtttgatttctaaaatgttcctgtaacatatcttttatgaacaaatctgaacaatttgtgaaataaaacattgaaaaccaaaaaaaaaaaaaaaaa

SEQ ID NO: 179 - DNA, 1516 bp, Homo sapiens
gccctccccggagcccagagctcgcagctccgccggcgcctggtcccagcgcccgcggcgccgcgtccccggcccaaccatggcgtcctccgcggccggctgcgtggtgatcgttggcagtggagtcattgggcgaagctgggccatgctgtttgccagtggaggcttccaggtgaaactctatgacattgagcaacagcagataaggaacgccctggaaaacatcagaaaggagatgaagttgctggagcaggcaggttctctgaaaggctccctgagtgtggaagagcagctgtcactcatcagtggttgtcccaatatccaagaagcagtagagggtgccatgcacattcaggaatgtgttccagaagatctagaactgaagaagaagatttttgctcagttagattccatcattgatgatcgagtgatcttaagcagttccacttcttgtctcatgccttccaagttgtttgctggcttggtccatgtgaagcaatgcatcgtggctcatcctgtgaatccgccatactacatcccgctggttgagctggtcccccacccggagacggcccctacgacagtggacagaacccacgccctgatgaagaagattggacagtgccccatgcgagtccagaaggaggtggccggcttcgttctgaaccgcctgcaatatgcaatcatcagcgaggcctggcggctagtggaggaaggaatcgtgtctcctagtgacctggaccttgtcatgtcagaagggttgggcatgcggtatgcattcattggacccctggaaaccatgcatctcaatgcagaaggtatgttaagctactgcgacagatacagcgaaggcataaaacatgtcctacagacttttggacccattccagagttttccagggccactgctgagaaggttaaccaggacatgtgcatgaaggtccctgatgacccggagcacttagctgccaggaggcagtggagggacgagtgcctcatgagactcgccaagttgaagagtcaagtgcagccccagtgaatttcttgtaatgcagcttccactcctctcattggaggccctatttgggaacactgcaagcccttaatcagccctctgtgacataggtagcagcccacggagatcctaagctggctgtcttgtgtgcagcctgagtggggtggtgcaggccggtagtctgcccgtcactttggatcatagccctgggcctggcggcacagcagcacttgcgttctcggggctgtcgatttcctgccacctgggcagataacctggagattttcaccttttcttttcagcttgattgcatttgactatattttacagccagtgattgtagtttcatgttaatatgtggcaaaatatttttgtaattattttctaatccctttctgagtactctggggccctgcatttatgaggcacctaccttcattttgctaacgcttattctgaataaaagtttttgattccttaaagacaaaaaaaaaaaaaaaa

SEQ ID NO: 180 - DNA, 3985 bp, Homo sapiens
gaagggcagacagagtgtccaaaagcgtgagagcacgaagtgaggagaaggtggagaagagagaagaggaagaggaagaggaagagaggaagcggagggaactgcggccaggctaaaaggggaagaagaggatcagcccaaggaggaggaagaggaaaacaagacaaacagccagtgcagaggagaggaacgtgtgtccagtgtcccgatccctgcggagctagtagctgagagctctgtgccctgggcaccttgcagccctgcacctgcctgccacttccccaccgaggccatgggcccaggagttctgctgctcctgctggtggccacagcttggcatggtcagggaatcccagtgatagagcccagtgtccctgagctggtcgtgaagccaggagcaacggtgaccttgcgatgtgtgggcaatggcagcgtggaatgggatggccccccatcacctcactggaccctgtactctgatggctccagcagcatcctcagcaccaacaacgctaccttccaaaacacggggacctatcgctgcactgagcctggagaccccctgggaggcagcgccgccatccacctctatgtcaaagaccctgcccggccctggaacgtgctagcacaggaggtggtcgtgttcgaggaccaggacgcactactgccctgtctgctcacagacccggtgctggaagcaggcgtctcgctggtgcgtgtgcgtggccggcccctcatgcgccacaccaactactccttctcgccctggcatggcttcaccatccacagggccaagttcattcagagccaggactatcaatgcagtgccctgatgggtggcaggaaggtgatgtccatcagcatccggctgaaagtgcagaaagtcatcccagggcccccagccttgacactggtgcctgcagagctggtgcggattcgaggggaggctgcccagatcgtgtgctcagccagcagcgttgatgttaactttgatgtcttcctccaacacaacaacaccaagctcgcaatccctcaacaatctgactttcataataaccgttaccaaaaagtcctgaccctcaacctcgatcaagtagatttccaacatgccggcaactactcctgcgtggccagcaacgtgcagggcaagcactccacctccatgttcttccgggtggtagagagtgcctacttgaacttgagctctgagcagaacctcatccaggaggtgaccgtgggggaggggctcaacctcaaagtcatggtggaggcctacccaggcctgcaaggttttaactggacctacctgggacccttttctgaccaccagcctgagcccaagcttgctaatgctaccaccaaggacacatacaggcacaccttcaccctctctctgccccgcctgaagccctctgaggctggccgctactccttcctggccagaaacccaggaggctggagagctctgacgtttgagctcacccttcgataccccccagaggtaagcgtcatatggacattcatcaacggctctggcacccttttgtgtgctgcctctgggtacccccagcccaacgtgacatggctgcagtgcagtggccacactgataggtgtgatgaggcccaagtgctgcaggtctgggatgacccataccctgaggtcctgagccaggagcccttccacaaggtgacggtgcagagcctgctgactgttgagaccttagagcacaaccaaacctacgagtgcagggcccacaacagcgtggggagtggctcctgggccttcatacccatctctgcaggagcccacacgcatcccccggatgagttcctcttcacaccagtggtggtcgcctgcatgtccatcatggccttgctgctgctgctgctcctgctgctattgtacaagtataagcagaagcccaagtaccaggtccgctggaagatcatcgagagctatgagggcaacagttatactttcatcgaccccacgcagctgccttacaacgagaagtgggagttcccccggaacaacctgcagtttggtaagaccctcggagctggagcctttgggaaggtggtggaggccacggcctttggtctgggcaaggaggatgctgtcctgaaggtggctgtgaagatgctgaagtccacggcccatgctgatgagaaggaggccctcatgtccgagctgaagatcatgagccacctgggccagcacgagaacatcgtcaaccttctgggagcctgtacccatggaggccctgtactggtcatcacggagtactgttgctatggcgacctgctcaactttctgcgaaggaaggctgaggccatgctgggacccagcctgagccccggccaggaccccgagggaggcgtcgactataagaacatccacctcgagaagaaatatgtccgcagggacagtggcttctccagccagggtgtggacacctatgtggagatgaggcctgtctccacttcttcaaatgactccttctctgagcaagacctggacaaggaggatggacggcccctggagctccgggacctgcttcacttctccagccaagtagcccagggcatggccttcctcgcttccaagaattgcatccaccgggacgtggcagcgcgtaacgtgctgttgaccaatggtcatgtggccaagattggggacttcgggctggctagggacatcatgaatgactccaactacattgtcaagggcaatgcccgcctgcctgtgaagtggatggccccagagagcatctttgactgtgtctacacggttcagagcgacgtctggtcctatggcatcctcctctgggagatcttctcacttgggctgaatccctaccctggcatcctggtgaacagcaagttctataaactggtgaaggatggataccaaatggcccagcctgcatttgccccaaagaatatatacagcatcatgcaggcctgctgggccttggagcccacccacagacccaccttccagcagatctgctccttccttcaggagcaggcccaagaggacaggagagagcgggactataccaatctgccgagcagcagcagaagcggtggcagcggcagcagcagcagtgagctggaggaggagagctctagtgagcacctgacctgctgcgagcaaggggatatcgcccagcccttgctgcagcccaacaactatcagttctgctgaggagttgacgacagggagtaccactctcccctcctccaaacttcaactcctccatggatggggcgacacggggagaacatacaaactctgccttcggtcatttcactcaacagctcggcccagctctgaaacttgggaaggtgagggattcaggggaggtcagaggatcccacttcctgagcatgggccatcactgccagtcaggggctgggggctgagccctcacccccccctcccctactgttctcatggtgttggcctcgtgtttgctatgccaactagtagaaccttctttcctaatccccttatcttcatggaaatggactgactttatgcctatgaagtccccaggagctacactgatactgagaaaaccaggctctttggggctagacagactggcagagagtgagatctccctctctgagaggagcagcagatgctcacagaccacactcagctcaggccccttggagcaggatggctcctctaagaatctcacaggacctcttagtctctgccctatacgccgccttcactccacagcctcacccctcccacccccatactggtactgctgtaatgagccaagtggcagctaaaagttgggggtgttctgcccagtcccgtcattctgggctagaaggcaggggaccttggcatgtggctggccacaccaagcaggaagcacaaactcccccaagctgactcatcctaactaacagtcacgccgtgggatgtctctgtccacattaaactaacagcattaatgca

SEQ ID NO: 181 - DNA, 1587 bp, Homo sapiens
ctcttcccttctctctgaccagcaccatgcttctcctggtgacaagccttctgctctgtgagttaccacacccagcattcctcctgatcccagagaaatcggatctgcgaacagtggcaccagcctctagtctcaatgtgaggtttgactccaggacgatgaatttaagctgggactgccaagaaaacacaaccttcagcaagtgtttcttaactgacaagaagaacagagtcgtggaacccaggctcagtaacaacgaatgttcgtgcacatttcgtgaaatttgtctgcatgaaggagtcacatttgaggttcacgtgaatactagtcaaagaggatttcaacagaaactgctttatccaaattcaggaagggagggtaccgctgctcagaatttctcctgtttcatctacaatgcggatttaatgaactgtacctgggcgaggggtccgacggccccccgtgacgtccagtattttttgtacatacgaaactcaaagagaaggagggagatccggtgtccttattacatacaagactcaggaacccatgtgggatgtcacctggataacctgtcaggattaacgtctcgcaattactttctggttaacggaaccagccgagaaattggcatccaattctttgattcacttttggacacaaagaaaatagaacgattcaaccctcccagcaatgtcaccgtacgttgcaacacgacgcactgcctcgtacggtggaaacagcccaggacctatcagaagctgtcgtacctggactttcagtaccagctggacgtccacagaaagaatacccagcctggcacggaaaacctactgattaatgtttctggtgatttggaaaatagatacaactttccaagctctgagcccagagcaaaacacagtgtgaagatcagagctgcagacgtccgcatcttgaattggagctcctggagtgaagccattgaatttggttccttaggatacagcggctgttcccgccagttccacagatcaaagacaaactgaatgataaccatgaggtggaagacgagatcatctgggaggaattcaccccagaggaagggaaaggctaccgcgaagaggtcttgaccgtgaaggaaattacctgagacccagagggtgtaggaatggcatggacatctccgcctccgcgacacgggggaactgttttcttgatgatgctgtgaacctttatatcattttctatgtttttatttaaaaacatgacatttggggccaggcgcggtggctcacgcctgtaatcccagcactttgggaggccaaggcaggcggatcacctgaggtcaggagttcaagaccagcctgcccaacatggtgaaaccccatctggactaaaaatgcagaaatttacccaggcacggcggcggacgcccatcatcccagctacttgggaggctgaggcaggagaattgcttgaacccgtgaggcggaggttgtagtgagccaagatcgcaccattgcacaccaacctgggtgacagagcaagattgcatctcaaaacaaacaataataataaataataaaaacctgatatttggctggg

SEQ ID NO: 182 - DNA, 1820 bp, Homo sapiens
ggagctactcagaagcgggagtctccgagagaagaaaagcaggtggaaggagaggaagcggatgccgtggggtttacagcaggaaaatccgtggagacagcagatccgagaagcggcgatgtttgcgtagaaccctctcttcccttctctctgaccagcaccatgcttctcctggtgacaagccttctgctctgtgagttaccacacccagcattcctcctgatcccagagaaatcggatctgcgaacagtggcaccagcctctagtctcaatgtgaggtttgactccaggacgatgaatttaagctgggactgccaagaaaacacaaccttcagcaagtgtttcttaactgacaagaagaacagagtcgtggaacccaggctcagtaacaacgaatgttcgtgcacatttcgtgaaatttgtctgcatgaaggagtcacatttgaggttcacgtgaatactagtcaaagaggatttcaacagaaactgctttatccaaattcaggaagggagggtaccgctgctcagaatttctcctgtttcatctacaatgcggatttaatgaactgtacctgggcgaggggtccgacggccccccgtgacgtccagtattttttgtacatacgaaactcaaagagaaggagggagatccggtgtccttattacatacaagactcaggaacccatgtgggatgtcacctggataacctgtcaggattaacgtctcgcaattactttctggttaacggaaccagccgagaaattggcatccaattctttgattcacttttggacacaaagaaaatagaacgattcaaccctcccagcaatgtcaccgtacgttgcaacacgacgcactgcctcgtacggtggaaacagcccaggacctatcagaagctgtcgtacctggactttcagtaccagctggacgtccacagaaagaatacccagcctggcacggaaaacctactgattaatgtttctggtgatttggaaaatagatacaactttccaagctctgagcccagagcaaaacacagtgtgaagatcagagctgcagacgtccgcatcttgaattggagctcctggagtgaagccattgaatttggttctgacgacgggaacctcggctctgtgtacatttatgtgctcctaatcgtgggaacccttgtctgtggcatcgtcctcggcttcctctttaaaaggttccttaggatacagcggctgttcccgccagttccacagatcaaagacaaactgaatgataaccatgaggtggaagacgagatcatctgggaggaattcaccccagaggaagggaaaggctaccgcgaagaggtcttgaccgtgaaggaaattacctgagacccagagggtgtaggaatggcatggacatctccgcctccgcgacacgggggaactgttttcttgatgatgctgtgaacctttatatcattttctatgtttttatttaaaaacatgacatttggggccaggcgcggtggctcacgcctgtaatcccagcactttgggaggccaaggcaggcggatcacctgaggtcaggagttcaagaccagcctgcccaacatggtgaaaccccatctggactaaaaatgcagaaatttacccaggcacggcggcggacgcccatcatcccagctacttgggaggctgaggcaggagaattgcttgaacccgtgaggcggaggttgtagtgagccaagatcgcaccattgcacaccaacctgggtgacagagcaagattgcatctcaaaacaaacaataataataaataataaaaacctgatatttggctggg

SEQ ID NO: 183 - DNA, 1844 bp, Homo sapiens
ggagctactcagaagcgggagtctccgagagaagaaaagcaggtggaaggagaggaagcggatgccgtggggtttacagcaggaaaatccgtggagacagcagatccgagaagcggcgatgtttgcgtagaaccctgtacgtgcttccttcggcctgtcgctcttcccttctctctgaccagcaccatgcttctcctggtgacaagccttctgctctgtgagttaccacacccagcattcctcctgatcccagagaaatcggatctgcgaacagtggcaccagcctctagtctcaatgtgaggtttgactccaggacgatgaatttaagctgggactgccaagaaaacacaaccttcagcaagtgtttcttaactgacaagaagaacagagtcgtggaacccaggctcagtaacaacgaatgttcgtgcacatttcgtgaaatttgtctgcatgaaggagtcacatttgaggttcacgtgaatactagtcaaagaggatttcaacagaaactgctttatccaaattcaggaagggagggtaccgctgctcagaatttctcctgtttcatctacaatgcggatttaatgaactgtacctgggcgaggggtccgacggccccccgtgacgtccagtattttttgtacatacgaaactcaaagagaaggagggagatccggtgtccttattacatacaagactcaggaacccatgtgggatgtcacctggataacctgtcaggattaacgtctcgcaattactttctggttaacggaaccagccgagaaattggcatccaattctttgattcacttttggacacaaagaaaatagaacgattcaaccctcccagcaatgtcaccgtacgttgcaacacgacgcactgcctcgtacggtggaaacagcccaggacctatcagaagctgtcgtacctggactttcagtaccagctggacgtccacagaaagaatacccagcctggcacggaaaacctactgattaatgtttctggtgatttggaaaatagatacaactttccaagctctgagcccagagcaaaacacagtgtgaagatcagagctgcagacgtccgcatcttgaattggagctcctggagtgaagccattgaatttggttctgacgacgggaacctcggctctgtgtacatttatgtgctcctaatcgtgggaacccttgtctgtggcatcgtcctcggcttcctctttaaaaggttccttaggatacagcggctgttcccgccagttccacagatcaaagacaaactgaatgataaccatgaggtggaagacgagatcatctgggaggaattcaccccagaggaagggaaaggctaccgcgaagaggtcttgaccgtgaaggaaattacctgagacccagagggtgtaggaatggcatggacatctccgcctccgcgacacgggggaactgttttcttgatgatgctgtgaacctttatatcattttctatgtttttatttaaaaacatgacatttggggccaggcgcggtggctcacgcctgtaatcccagcactttgggaggccaaggcaggcggatcacctgaggtcaggagttcaagaccagcctgcccaacatggtgaaaccccatctggactaaaaatgcagaaatttacccaggcacggcggcggacgcccatcatcccagctacttgggaggctgaggcaggagaattgcttgaacccgtgaggcggaggttgtagtgagccaagatcgcaccattgcacaccaacctgggtgacagagcaagattgcatctcaaaacaaacaataataataaataataaaaacctgatatttggctggg

SEQ ID NO: 184 - DNA, 1665 bp, Homo sapiens
ggagctactcagaagcgggagtctccgagagaagaaaagcaggtggaaggagaggaagcggatgccgtggggtttacagcaggaaaatccgtggagacagcagatccgagaagcggcgatgtttgcgtagaaccctgtacgtgcttccttcggcctgtcgctcttcccttctctctgaccagcaccatgcttctcctggtgacaagccttctgctctgtgagttaccacacccagcattcctcctgatcccagagaaatcggatctgcgaacagtggcaccagcctctagtctcaatgtgaggtttgactccaggacgatgaatttaagctgggactgccaagaaaacacaaccttcagcaagtgtttcttaactgacaagaagaacagagtcgtggaacccaggctcagtaacaacgaatgttcgtgcacatttcgtgaaatttgtctgcatgaaggagtcacatttgaggttcacgtgaatactagtcaaagaggatttcaacagaaactgctttatccaaattcaggaagggagggtaccgctgctcagaatttctcctgtttcatctacaatgcggatttaatgaactgtacctgggcgaggggtccgacggccccccgtgacgtccagtattttttgtacatacgaaactcaaagagaaggagggagatccggtgtccttattacatacaagactcaggaacccatgtgggatgtcacctggataacctgtcaggattaacgtctcgcaattactttctggttaacggaaccagccgagaaattggcatccaattctttgattcacttttggacacaaagaaaatagaacgattcaaccctcccagcaatgtcaccgtacgttgcaacacgacgcactgcctcgtacggtggaaacagcccaggacctatcagaagctgtcgtacctggactttcagtaccagctggacgtccacagaaagaatacccagcctggcacggaaaacctactgattaatgtttctggtgatttggaaaatagatacaactttccaagctctgagcccagagcaaaacacagtgtgaagatcagagctgcagacgtccgcatcttgaattggagctcctggagtgaagccattgaatttgatcatctgggaggaattcaccccagaggaagggaaaggctaccgcgaagaggtcttgaccgtgaaggaaattacctgagacccagagggtgtaggaatggcatggacatctccgcctccgcgacacgggggaactgttttcttgatgatgctgtgaacctttatatcattttctatgtttttatttaaaaacatgacatttggggccaggcgcggtggctcacgcctgtaatcccagcactttgggaggccaaggcaggcggatcacctgaggtcaggagttcaagaccagcctgcccaacatggtgaaaccccatctggactaaaaatgcagaaatttacccaggcacggcggcggacgcccatcatcccagctacttgggaggctgaggcaggagaattgcttgaacccgtgaggcggaggttgtagtgagccaagatcgcaccattgcacaccaacctgggtgacagagcaagattgcatctcaaaacaaacaataataataaataataaaaacctgatatttggctggg

SEQ ID NO: 185 - DNA, 1708 bp, Homo sapiens
ggagctactcagaagcgggagtctccgagagaagaaaagcaggtggaaggagaggaagcggatgccgtggggtttacagcaggaaaatccgtggagacagcagatccgagaagcggcgatgtttgcgtagaaccctgtacgtgcttccttcggcctgtcgctcttcccttctctctgaccagcaccatgcttctcctggtgacaagccttctgctctgtgagttaccacacccagcattcctcctgatcccagagaaatcggatctgcgaacagtggcaccagcctctagtctcaatgtgaggtttgactccaggacgatgaatttaagctgggactgccaagaaaacacaaccttcagcaagtgtttcttaactgacaagaagaacagagtcgtggaacccaggctcagtaacaacgaatgttcgtgcacatttcgtgaaatttgtctgcatgaaggagtcacatttgaggttcacgtgaatactagtcaaagaggatttcaacagaaactgctttatccaaattcaggaagggagggtaccgctgctcagaatttctcctgtttcatctacaatgcggatttaatgaactgtacctgggcgaggggtccgacggccccccgtgacgtccagtattttttgtacatacgaaactcaaagagaaggagggagatccggtgtccttattacatacaagactcaggaacccatgtgggatgtcacctggataacctgtcaggattaacgtctcgcaattactttctggttaacggaaccagccgagaaattggcatccaattctttgattcacttttggacacaaagaaaatagaacgattcaaccctcccagcaatgtcaccgtacgttgcaacacgacgcactgcctcgtacggtggaaacagcccaggacctatcagaagctgtcgtacctggactttcagtaccagctggacgtccacagaaagaatacccagcctggcacggaaaacctactggttctgacgacgggaacctcggctctgtgtacatttatgtgctcctaatcgtgggaacccttgtctgtggcatcgtcctcggcttcctctttaaaaggttccttaggatacagcggctgttcccgccagttccacagatcaaagacaaactgaatgataaccatgaggtggaagacgagatcatctgggaggaattcaccccagaggaagggaaaggctaccgcgaagaggtcttgaccgtgaaggaaattacctgagacccagagggtgtaggaatggcatggacatctccgcctccgcgacacgggggaactgttttcttgatgatgctgtgaacctttatatcattttctatgtttttatttaaaaacatgacatttggggccaggcgcggtggctcacgcctgtaatcccagcactttgggaggccaaggcaggcggatcacctgaggtcaggagttcaagaccagcctgcccaacatggtgaaaccccatctggactaaaaatgcagaaatttacccaggcacggcggcggacgcccatcatcccagctacttgggaggctgaggcaggagaattgcttgaacccgtgaggcggaggttgtagtgagccaagatcgcaccattgcacaccaacctgggtgacagagcaagattgcatctcaaaacaaacaataataataaataataaaaacctgatatttggctggg

SEQ ID NO: 186 - DNA, 11185 bp, Homo sapiens
gctgccccgagcctttctggggaagaactccaggcgtgcggacgcaacagccgagaacattaggtgttgtggacaggagctgggaccaagatcttcggccagccccgcatcctcccgcatcttccagcaccgtcccgcaccctccgcatccttccccgggccaccacgcttcctatgtgacccgcctgggcaacgccgaacccagtcgcgcagcgctgcagtgaattttccccccaaactgcaataagccgccttccaaggccaagatgttcataaatataaagagcatcttatggatgtgttcaaccttaatagtaacccatgcgctacataaagtcaaagtgggaaaaagcccaccggtgaggggctccctctctggaaaagtcagcctaccttgtcatttttcaacgatgcctactttgccacccagttacaacaccagtgaatttctccgcatcaaatggtctaagattgaagtggacaaaaatggaaaagatttgaaagagactactgtccttgtggcccaaaatggaaatatcaagattggtcaggactacaaagggagagtgtctgtgcccacacatcccgaggctgtgggcgatgcctccctcactgtggtcaagctgctggcaagtgatgcgggtctttaccgctgtgacgtcatgtacgggattgaagacacacaagacacggtgtcactgactgtggatggggttgtgtttcactacagggcggcaaccagcaggtacacactgaattttgaggctgctcagaaggcttgtttggacgttggggcagtcatagcaactccagagcagctctttgctgcctatgaagatggatttgagcagtgtgacgcaggctggctggctgatcagactgtcagatatcccatccgggctcccagagtaggctgttatggagataagatgggaaaggcaggagtcaggacttatggattccgttctccccaggaaacttacgatgtgtattgttatgtggatcatctggatggtgatgtgttccacctcactgtccccagtaaattcaccttcgaggaggctgcaaaagagtgtgaaaaccaggatgccaggctggcaacagtgggggaactccaggcggcatggaggaacggctttgaccagtgcgattacgggtggctgtcggatgccagcgtgcgccaccctgtgactgtggccagggcccagtgtggaggtggtctacttggggtgagaaccctgtatcgttttgagaaccagacaggcttccctccccctgatagcagatttgatgcctactgctttaaacctaaagaggctacaaccatcgatttgagtatcctcgcagaaactgcatcacccagtttatccaaagaaccacaaatggtttctgatagaactacaccaatcatccctttagttgatgaattacctgtcattccaacagagttccctcccgtgggaaatattgtcagttttgaacagaaagccacagtccaacctcaggctatcacagatagtttagccaccaaattacccacacctactggcagtaccaagaagccctgggatatggatgactactcaccttctgcttcaggacctcttggaaagctagacatatcagaaattaaggaagaagtgctccagagtacaactggcgtctctcattatgctacggattcatgggatggtgtcgtggaagataaacaaacacaagaatcggttacacagattgaacaaatagaagtgggtcctttggtaacatctatggaaatcttaaagcacattccttccaaggaattccctgtaactgaaacaccattggtaactgcaagaatgatcctggaatccaaaactgaaaagaaaatggtaagcactgtttctgaattggtaaccacaggtcactatggattcaccttgggagaagaggatgatgaagacagaacacttacagttggatctgatgagagcaccttgatctttgaccaaattcctgaagtcattacggtgtcaaagacttcagaagacaccatccacactcatttagaagacttggagtcagtctcagcatccacaactgtttcccctttaattatgcctgataataatggatcatccatggatgactgggaagagagacaaactagtggtaggataacggaagagtttcttggcaaatatctgtctactacaccttttccatcacagcatcgtacagaaatagaattgtttccttattctggtgataaaatattagtagagggaatttccacagttatttatccttctctacaaacagaaatgacacatagaagagaaagaacagaaacactaataccagagatgagaacagatacttatacagatgaaatacaagaagagatcactaaaagtccatttatgggaaaaacagaagaagaagtcttctctgggatgaaactctctacatctctctcagagccaattcatgttacagagtcttctgtggaaatgaccaagtcttttgatttcccaacattgataacaaagttaagtgcagagccaacagaagtaagagatatggaggaagactttacagcaactccaggtactacaaaatatgatgaaaatattacaacagtgcttttggcccatggtactttaagtgttgaagcagccactgtatcaaaatggtcatgggatgaagataatacaacatccaagcctttagagtctacagaaccttcagcctcttcaaaattgccccctgccttactcacaactgtggggatgaatggaaaggataaagacatcccaagtttcactgaagatggagcagatgaatttactcttattccagatagtactcaaaagcagttagaggaggttactgatgaagacatagcagcccatggaaaattcacaattagatttcagccaactacatcaactggtattgcagaaaagtcaactttgagagattctacaactgaagaaaaagttccacctatcacaagcactgaaggccaagtttatgcaaccatggaaggaagtgctttgggtgaagtagaagatgtggacctctctaagccagtatctactgttccccaatttgcacacacttcagaggtggaaggattagcatttgttagttatagtagcacccaagagcctactacttatgtagactcttcccataccattcctctttctgtaattcccaagacagactggggagtgttagtaccttctgttccatcagaagatgaagttctaggtgaaccctctcaagacatacttgtcattgatcagactcgccttgaagcgactatttctccagaaactatgagaacaacaaaaatcacagagggaacaactcaggaagaattcccttggaaagaacagactgcagagaaaccagttcctgctctcagttctacagcttggactcccaaggaggcagtaacaccactggatgaacaagagggcgatggatcagcatatacagtctctgaagatgaattgttgacaggttctgagagggtcccagttttagaaacaactccagttggaaaaattgatcacagtgtgtcttatccaccaggtgctgtaactgagcacaaagtgaaaacagatgaagtggtaacactaacaccacgcattgggccaaaagtatctttaagtccagggcctgaacaaaaatatgaaacagaaggtagtagtacaacaggatttacatcatctttgagtccttttagtacccacattacccagcttatggaagaaaccactactgagaaaacatccctagaggatattgatttaggctcaggattatttgaaaagcccaaagccacagaactcatagaattttcaacaatcaaagtcacagttccaagtgatattaccactgccttcagttcagtagacagacttcacacaacttcagcattcaagccatcttccgcgatcactaagaaaccacctctcatcgacagggaacctggtgaagaaacaaccagtgacatggtaatcattggagaatcaacatctcatgttcctcccactacccttgaagatattgtagccaaggaaacagaaaccgatattgatagagagtatttcacgacttcaagtcctcctgctacacagccaacaagaccacccactgtggaagacaaagaggcctttggacctcaggcgctttctacgccacagcccccagcaagcacaaaatttcaccctgacattaatgtttatattattgaggtcagagaaaataagacaggtcgaatgagtgatttgagtgtaattggtcatccaatagattcagaatctaaagaagatgaaccttgtagtgaagaaacagatccagtgcatgatctaatggctgaaattttacctgaattccctgacataattgaaatagacctataccacagtgaagaaaatgaagaagaagaagaagagtgtgcaaatgctactgatgtgacaaccaccccatctgtgcagtacataaatgggaagcatctcgttaccactgtgcccaaggacccagaagctgcagaagctaggcgtggccagtttgaaagtgttgcaccttctcagaatttctcggacagctctgaaagtgatactcatccatttgtaatagccaaaacggaattgtctactgctgtgcaacctaatgaatctacagaaacaactgagtctcttgaagttacatggaagcctgagacttaccctgaaacatcagaacatttttcaggtggtgagcctgatgttttccccacagtcccattccatgaggaatttgaaagtggaacagccaaaaaaggggcagaatcagtcacagagagagatactgaagttggtcatcaggcacatgaacatactgaacctgtatctctgtttcctgaagagtcttcaggagagattgccattgaccaagaatctcagaaaatagcctttgcaagggctacagaagtaacatttggtgaagaggtagaaaaaagtacttctgtcacatacactcccactatagttccaagttctgcatcagcatatgtttcagaggaagaagcagttaccctaataggaaatccttggccagatgacctgttgtctaccaaagaaagctgggtagaagcaactcctagacaagttgtagagctctcagggagttcttcgattccaattacagaaggctctggagaagcagaagaagatgaagatacaatgttcaccatggtaactgatttatcacagagaaatactactgatacactcattactttagacactagcaggataatcacagaaagcttttttgaggttcctgcaaccaccatttatccagtttctgaacaaccttctgcaaaagtggtgcctaccaagtttgtaagtgaaacagacacttctgagtggatttccagtaccactgttgaggaaaagaaaaggaaggaggaggagggaactacaggtacggcttctacatttgaggtatattcatctacacagagatcggatcaattaattttaccctttgaattagaaagtccaaatgtagctacatctagtgattcaggtaccaggaaaagttttatgtccttgacaacaccaacacagtctgaaagggaaatgacagattctactcctgtctttacagaaacaaatacattagaaaatttgggggcacagaccactgagcacagcagtatccatcaacctggggttcaggaagggctgaccactctcccacgtagtcctgcctctgtctttatggagcagggctctggagaagctgctgccgacccagaaaccaccactgtttcttcattttcattaaacgtagagtatgcaattcaagccgaaaaggaagtagctggcactttgtctccgcatgtggaaactacattctccactgagccaacaggactggttttgagtacagtaatggacagagtagttgctgaaaatataacccaaacatccagggaaatagtgatttcagagcgattaggagaaccaaattatggggcagaaataaggggcttttccacaggttttcctttggaggaagatttcagtggtgactttagagaatactcaacagtgtctcatcccatagcaaaagaagaaacggtaatgatggaaggctctggagatgcagcatttagggacacccagacttcaccatctacagtacctacttcagttcacatcagtcacatatctgactcagaaggacccagtagcaccatggtcagcacttcagccttcccctgggaagagtttacatcctcagctgagggctcaggtgagcaactggtcacagtcagcagctctgttgttccagtgcttcccagtgctgtgcaaaagttttctggtacagcttcctccattatcgacgaaggattgggagaagtgggtactgtcaatgaaattgatagaagatccaccattttaccaacagcagaagtggaaggtacgaaagctccagtagagaaggaggaagtaaaggtcagtggcacagtttcaacaaactttccccaaactatagagccagccaaattatggtctaggcaagaagtcaaccctgtaagacaagaaattgaaagtgaaacaacatcagaggaacaaattcaagaagaaaagtcatttgaatcccctcaaaactctcctgcaacagaacaaacaatctttgattcacagacatttactgaaactgaactcaaaaccacagattattctgtactaacaacaaagaaaacttacagtgatgataaagaaatgaaggaggaagacacttctttagttaacatgtctactccagatccagatgcaaatggcttggaatcttacacaactctccctgaagctactgaaaagtcacattttttcttagctactgcattagtaactgaatctataccagctgaacatgtagtcacagattcaccaatcaaaaaggaagaaagtacaaaacattttccgaaaggcatgagaccaacaattcaagagtcagatactgagctcttattctctggactgggatcaggagaagaagttttacctactctaccaacagagtcagtgaattttactgaagtggaacaaatcaataacacattatatccccacacttctcaagtggaaagtacctcaagtgacaaaattgaagactttaacagaatggaaaatgtggcaaaagaagttggaccactcgtatctcaaacagacatctttgaaggtagtgggtcagtaaccagcacaacattaatagaaattttaagtgacactggagcagaaggacccacggtggcacctctccctttctccacggacatcggacatcctcaaaatcagactgtcaggtgggcagaagaaatccagactagtagaccacaaaccataactgaacaagactctaacaagaattcttcaacagcagaaattaacgaaacaacaacctcatctactgattttctggctagagcttatggttttgaaatggccaaagaatttgttacatcagcaccaaaaccatctgacttgtattatgaaccttctggagaaggatctggagaagtggatattgttgattcatttcacacttctgcaactactcaggcaaccagacaagaaagcagcaccacatttgtttctgatgggtccctggaaaaacatcctgaggtgccaagcgctaaagctgttactgctgatggattcccaacagtttcagtgatgctgcctcttcattcagagcagaacaaaagctcccctgatccaactagcacactgtcaaatacagtgtcatatgagaggtccacagacggtagtttccaagaccgtttcagggaattcgaggattccaccttaaaacctaacagaaaaaaacccactgaaaatattatcatagacctggacaaagaggacaaggatttaatattgacaattacagagagtaccatccttgaaattctacctgagctgacatcggataaaaatactatcatagatattgatcatactaaacctgtgtatgaagacattcttggaatgcaaacagatatagatacagaggtaccatcagaaccacatgacagtaatgatgaaagtaatgatgacagcactcaagttcaagagatctatgaggcagctgtcaacctttctttaactgaggaaacatttgagggctctgctgatgttctggctagctacactcaggcaacacatgatgaatcaatgacttatgaagatagaagccaactagatcacatgggctttcacttcacaactgggatccctgctcctagcacagaaacagaattagacgttttacttcccacggcaacatccctgccaattcctcgtaagtctgccacagttattccagagattgaaggaataaaagctgaagcaaaagccctggatgacatgtttgaatcaagcactttgtctgatggtcaagctattgcagaccaaagtgaaataataccaacattgggccaatttgaaaggactcaggaggagtatgaagacaaaaaacatgctggtccttcttttcagccagaattctcttcaggagctgaggaggcattagtagaccatactccctatctaagtattgctactacccaccttatggatcagagtgtaacagaggtgcctgatgtgatggaaggatccaatcccccatattacactgatacaacattagcagtttcaacatttgcgaagttgtcttctcagacaccatcatctcccctcactatctactcaggcagtgaagcctctggacacacagagatcccccagcccagtgctctgccaggaatagacgtcggctcatctgtaatgtccccacaggattcttttaaggaaattcatgtaaatattgaagcaactttcaaaccatcaagtgaggaataccttcacataactgagcctccctctttatctcctgacacaaaattagaaccttcagaagatgatggtaaacctgagttattagaagaaatggaagcttctcccacagaacttattgctgtggaaggaactgagattctccaagatttccaaaacaaaaccgatggtcaagtttctggagaagcaatcaagatgtttcccaccattaaaacacctgaggctggaactgttattacaactgccgatgaaattgaattagaaggtgctacacagtggccacactctacttctgcttctgccacctatggggtcgaggcaggtgtggtgccttggctaagtccacagacttctgagaggcccacgctttcttcttctccagaaataaaccctgaaactcaagcagctttaatcagagggcaggattccacgatagcagcatcagaacagcaagtggcagcgagaattcttgattccaatgatcaggcaacagtaaaccctgtggaatttaatactgaggttgcaacaccaccattttcccttctggagacttctaatgaaacagatttcctgattggcattaatgaagagtcagtggaaggcacggcaatctatttaccaggacctgatcgctgcaaaatgaacccgtgccttaacggaggcacctgttatcctactgaaacttcctacgtatgcacctgtgtgccaggatacagcggagaccagtgtgaacttgattttgatgaatgtcactctaatccctgtcgtaatggagccacttgtgttgatggttttaacacattcaggtgcctctgccttccaagttatgttggtgcactttgtgagcaagataccgagacatgtgactatggctggcacaaattccaagggcagtgctacaaatactttgcccatcgacgcacatgggatgcagctgaacgggaatgccgtctgcagggtgcccatctcacaagcatcctgtctcacgaagaacaaatgtttgttaatcgtgtgggccatgattatcagtggataggcctcaatgacaagatgtttgagcatgacttccgttggactgatggcagcacactgcaatacgagaattggagacccaaccagccagacagcttcttttctgctggagaagactgtgttgtaatcatttggcatgagaatggccagtggaatgatgttccctgcaattaccatctcacctatacgtgcaagaaaggaacagttgcttgcggccagccccctgttgtagaaaatgccaagacctttggaaagatgaaacctcgttatgaaatcaactccctgattagataccactgcaaagatggtttcattcaacgtcaccttccaactatccggtgcttaggaaatggaagatgggctatacctaaaattacctgcatgaacccatctgcataccaaaggacttattctatgaaatactttaaaaattcctcatcagcaaaggacaattcaataaatacatccaaacatgatcatcgttggagccggaggtggcaggagtcgaggcgctgatccctaaaatggcgaacatgtgttttcatcatttcagccaaagtcctaacttcctgtgcctttcctatcacctcgagaagtaattatcagttggtttggatttttggaccaccgttcagtcattttgggttgccgtgctcccaaaacattttaaatgaaagtattggcattcaaaaagacagcagacaaaatgaaagaaaatgagagcagaaagtaagcatttccagcctatctaatttctttagttttctatttgcctccagtgcagtccatttcctaatgtataccagcctactgtactatttaaaatgctcaatttcagcaccgatggccatgtaaataagatgatttaatgttgattttaatcctgtatataaaataaaaagtcacaatgagtttgggcatatttaatgatgattatggagccttagaggtctttaatcattggttcggctgcttttatgtagtttaggctggaaatggtttcacttgctctttgactgtcagcaagactgaagatggcttttcctggacagctagaaaacacaaaatcttgtaggtcattgcacctatctcagccataggtgcagtttgcttctacatgatgctaaaggctgcgaatgggatcctgatggaactaaggactccaatgtcgaactcttctttgctgcattcctttttcttcacttacaagaaaggcctgaatggaggacttttctgtaaccagg

SEQ ID NO: 187 - DNA, 2358 bp, Homo sapiens
aaactcacacaacaactcttccccgctgagaggagacagccagtgcgactccaccctccagctcgacggcagccgccccggccgacagccccgagacgacagcccggcgcgtcccggtccccacctccgaccaccgccagcgctccaggccccgccgctccccgctcgccgccaccgcgccctccgctccgcccgcagtgccaaccatgaccgccgccagtatgggccccgtccgcgtcgccttcgtggtcctcctcgccctctgcagccggccggccgtcggccagaactgcagcgggccgtgccggtgcccggacgagccggcgccgcgctgcccggcgggcgtgagcctcgtgctggacggctgcggctgctgccgcgtctgcgccaagcagctgggcgagctgtgcaccgagcgcgacccctgcgacccgcacaagggcctcttctgtgacttcggctccccggccaaccgcaagatcggcgtgtgcaccgccaaagatggtgctccctgcatcttcggtggtacggtgtaccgcagcggagagtccttccagagcagctgcaagtaccagtgcacgtgcctggacggggcggtgggctgcatgcccctgtgcagcatggacgttcgtctgcccagccctgactgccccttcccgaggagggtcaagctgcccgggaaatgctgcgaggagtgggtgtgtgacgagcccaaggaccaaaccgtggttgggcctgccctcgcggcttaccgactggaagacacgtttggcccagacccaactatgattagagccaactgcctggtccagaccacagagtggagcgcctgttccaagacctgtgggatgggcatctccacccgggttaccaatgacaacgcctcctgcaggctagagaagcagagccgcctgtgcatggtcaggccttgcgaagctgacctggaagagaacattaagaagggcaaaaagtgcatccgtactcccaaaatctccaagcctatcaagtttgagctttctggctgcaccagcatgaagacataccgagctaaattctgtggagtatgtaccgacggccgatgctgcaccccccacagaaccaccaccctgccggtggagttcaagtgccctgacggcgaggtcatgaagaagaacatgatgttcatcaagacctgtgcctgccattacaactgtcccggagacaatgacatctttgaatcgctgtactacaggaagatgtacggagacatggcatgaagccagagagtgagagacattaactcattagactggaacttgaactgattcacatctcatttttccgtaaaaatgatttcagtagcacaagttatttaaatctgtttttctaactgggggaaaagattcccacccaattcaaaacattgtgccatgtcaaacaaatagtctatcaaccccagacactggtttgaagaatgttaagacttgacagtggaactacattagtacacagcaccagaatgtatattaaggtgtggctttaggagcagtgggagggtaccagcagaaaggttagtatcatcagatagcatcttatacgagtaatatgcctgctatttgaagtgtaattgagaaggaaaattttagcgtgctcactgacctgcctgtagccccagtgacagctaggatgtgcattctccagccatcaagagactgagtcaagttgttccttaagtcagaacagcagactcagctctgacattctgattcgaatgacactgttcaggaatcggaatcctgtcgattagactggacagcttgtggcaagtgaatttgcctgtaacaagccagattttttaaaatttatattgtaaatattgtgtgtgtgtgtgtgtgtgtatatatatatatatgtacagttatctaagttaatttaaagttgtttgtgcctttttatttttgtttttaatgctttgatatttcaatgttagcctcaatttctgaacaccataggtagaatgtaaagcttgtctgatcgttcaaagcatgaaatggatacttatatggaaattctgctcagatagaatgacagtccgtcaaaacagattgtttgcaaaggggaggcatcagtgtccttggcaggctgatttctaggtaggaaatgtggtagcctcacttttaatgaacaaatggcctttattaaaaactgagtgactctatatagctgatcagttttttcacctggaagcatttgtttctactttgatatgactgtttttcggacagtttatttgttgagagtgtgaccaaaagttacatgtttgcacctttctagttgaaaataaagtgtatattttttctataaaaaaaaaaaaaaaaa

SEQ ID NO: 188 - DNA, 1236 bp, Homo sapiens
ctgcggcggcctcggagcgcggcggagccagacgctgaccacgttcctctcctcggtctcctccgcctccagctccgcgctgcccggcagccgggagccatgcgaccccagggccccgccgcctccccgcagcggctccgcggcctcctgctgctcctgctgctgcagctgcccgcgccgtcgagcgcctctgagatccccaaggggaagcaaaaggcgcagctccggcagagggaggtggtggacctgtataatggaatgtgcttacaagggccagcaggagtgcctggtcgagacgggagccctggggccaatggcattccgggtacacctgggatcccaggtcgggatggattcaaaggagaaaagggggaatgtctgagggaaagctttgaggagtcctggacacccaactacaagcagtgttcatggagttcattgaattatggcatagatcttgggaaaattgcggagtgtacatttacaaagatgcgttcaaatagtgctctaagagttttgttcagtggctcacttcggctaaaatgcagaaatgcatgctgtcagcgttggtatttcacattcaatggagctgaatgttcaggacctcttcccattgaagctataatttatttggaccaaggaagccctgaaatgaattcaacaattaatattcatcgcacttcttctgtggaaggactttgtgaaggaattggtgctggattagtggatgttgctatctgggttggcacttgttcagattacccaaaaggagatgcttctactggatggaattcagtttctcgcatcattattgaagaactaccaaaataaatgctttaattttcatttgctacctctttttttattatgccttggaatggttcacttaaatgacattttaaataagtttatgtatacatctgaatgaaaagcaaagctaaatatgtttacagaccaaagtgtgatttcacactgtttttaaatctagcattattcattttgcttcaatcaaaagtggtttcaatattttttttagttggttagaatactttcttcatagtcacattctctcaacctataatttggaatattgttgtggtcttttgttttttctcttagtatagcatttttaaaaaaatataaaagctaccaatctttgtacaatttgtaaatgttaagaattttttttatatctgttaaataaaaattatttccaacaaaaaaaaaaaaaaaaaa

SEQ ID NO: 189 - DNA, 6131 bp, Homo sapiens
agctatttcaaggcgcgcgcctcgtggtggactcaccgctagcccgcagcgctcggcttcctggtaattcttcacctcttttctcagctccctgcagcatgggtgctgggccctccttgctgctcgccgccctcctgctgcttctctccggcgacggcgccgtgcgctgcgacacacctgccaactgcacctatcttgacctgctgggcacctgggtcttccaggtgggctccagcggttcccagcgcgatgtcaactgctcggttatgggaccacaagaaaaaaaagtagtggtgtaccttcagaagctggatacagcatatgatgaccttggcaattctggccatttcaccatcatttacaaccaaggctttgagattgtgttgaatgactacaagtggtttgccttttttaaggatgtcactgattttatcagtcatttgttcatgcagctgggaactgtggggatatatgatttgccacatctgaggaacaaactggttattaaatagagcatctgttgagggactcttttaaaaccacagccatgaacagacgttggggctaagagacagagcagcctgcgacagtgtggacctacctgtagcagctagcaaaggcctctagcagctacagtcccttctggagtctttatttgcatgcaaaatgcaaaggagtcctggtgacctacctccaaggcagctgccctcctgaacactcccttggaaaacagtaaacatcattttggaatgtgaacaaccagagactacacaggagaaaggaaaaaaaaattctgaagatgcaaaatcttgggtggcttcaccgttcagttttttaataaaaggaacaatatacaacacgttgttctttttctcttttgaaatcccttctattacagtgatttttttctaagattgtcaggatttgaagtgtatgttttgttttattcacagcgtaaattttattcacagtttaactgtctgcctgagtgtctttcctttctctaattaccttgaggaacccaagagcctgttgtaaggagaaaataaggcccttggatctcttgagattcacagatataagttattgaagggaagatggtcctatggaggacatatttaaagaagggaaaaaagaggctttctcagatatgtcagactgctatagtatacttctacagattatagacctccagtacctctggccagaaagatggtatcgtaaacaccctattttttttcttttcttttttcattaggtacaagctttgtgctaagaagttgacatactataagctacaaaagttctgtaaagtagatataactagtttcattttatagatagagaaaattaatctcttacagtgctaagctcacagagtttctaactgtaaaatgctagaacttgtctttcaagcctaaagacttccttggggctaaatagtgaaaaaagccatttcacaaataagtaaatggtatttagaggcatatttggatttcctggtaaattccagtctgtgagcatcatgaatattagtttaatgttgcatgggctcatgttgaagttttaagagaagaactgccttgaagcttaggtttccttagctattaggctactgactttcttgcctaaaccagggttttttcattgaagaccaaaacttaccttctccttcagtttgtagtttggaaattggtagaagagctttgtaaacttcaaattaagtacaaactaagtgtcatagtcaaatttactaatcttaattacagtattgttcaactgattgctatcttctagctctttcctgccgaataatggtcttgtttcctgctctgttggtttagagctgacttctttcagctttggtaagcctgaaattatggggttatgtttaattcatattgtctgggtggactttcctctcttgcatttctgcttgaatagaagaatttttctctagagagtagtttgtcatccttactctgttgattcagatgactctttgtatgatctgagaggtatactgttctgctattctgagaagaagtatttcagaaagatgaattaagagtacagtggactgctcccacctggaaacttttatctatctcacctctggacctgataaattctttatcactcaggaccttgatgacgctgctctctgaaaccctccccagctctctctattaccgtgagaaacatcagaactttggttcccattgcatatcgcaggtacctctgctttcatgccatgctgtaatggagtgattgggtagcatgttttcatctctttccagattgaaaatctgtatttctccctgtatatcttcaacacctaatgcacatagaactttgtaggtacctggaaaatgcaccacagttttcttttctttttgcagacttttcacaagtattaccaacttacaaagaattaattttgtaggattctagaaagacaaatcaggaatggtgccatatacatcttttttgattccctgctctaaagaatattatcaggttaccttcctgcagagttttaaaagaattgcatatttcaagctgactttcaggatgtaaatataaccaaagcaactgatatgtaaaaaatatattcaatggcattcctagattttcttctagggtgttttattgttttgggttttacatttaagtctttaatccatcttgagttaatttttgtataggtataagaaaggggtccagttttaattttctgcgtatggctagccagttctcccagcaccatttattaaatagggaatcctttccctattgtttgtttttgtacggtttgtcaaagattagatggttgtagatgtgtggtcttatttctgagatcttcattctcttccactggtctatgtgtctgtttttgtaccatgcttttttggttactgtagccttgtagtatagtatgaaagatagcatgatgcctccaggtttgttctttttgcttaggattgtcttggctatacgagcttttttttggttctatatgaattttaaaatagtttcttctaattgtgtgaagaatgttaatggtagtttaatgggaatagcattgaatctgtgaattgctttgggcagtatggccattttcatgatattgattcttcctatccatgagcatgtaacgtttttcccttcgtttgtgtcctctctcatttccttgagtagtggtttgtagttctccttgaagagatccttcacttcttctgtattcctagatattttattctctctgtagctattgggaatgggagttcattcatgattttgctctctgcttgccttttgttggtgtatagggatcctggtgacttctgcacattgattttgtatcctgagactttaccgaagttgcttatcagcttaagaagcttttgggctgagatgatggggttttctagatataggatcatgttatcttcaaacaaagacaatttgacttcctctcttcctatttgagtacgctttatttctttctcttgcctgattgccctggccagaactcccaatactatattgaataagaatggtgagagagggcatccttgtcttgtgccagttttcacggggaatgcttccagcttttgcccattcagtatgatattatctgtgggtttctcataaaaagctcttattatttgagatacgttccttcaatacctagtttattgagagtttttaacatgaagcgatgttgaattgtatcgaaggccttttctgtgtctattgagataatcatgtggtttttgtctttagttctgtttatgtgatgaatgacgtttattgatttgcatatgttgaaccggccttgcatcctggggatgaagccaacttgactgtggtagataagcttttggatgtgctgctggatttggtttatcagtatttcattgagattttttgcgtcgaagttcatcagggatattggactgaagttttctttttgttgtcgtatctctgccaggttttggtatcaggatgatgctggcctcataaaatgagttagggaggagtccctccttttcaattgtttggaatagtttcagaagaaagggtatcagctcctctttgtacctctggtagaattcaactgtaaatccatctggtcctggactttttttcattagtaggctatttattactgcctcactttcataacttgttattgatctattcagggatccaacttcttcctgattcagtcttgggagtgtgtatgcatccaggaatttatccatttcttctagattttctagtttctttgcatagaggtgtttgtagtatttgctgttggttgtttgtacttctgtgagatcagtggtggtatcctgtttatcattttttattgtgtctgtttgattcttctcttatttttgacaaagctgacaaaaagaagcaatagggaaaggactctctattcaattaatcctactgtatatctggctagccatatgcagaaaattgaaactgttcctgtttcttaatccatatacgaaaatcaacttacgatggattaaagacttaaatgtaaaacccaaaattataaaaccctggaatagaatataggcaatatcattctggacataggaatgggcaaagattttatgagaaagacaccaaaagcaattacaacaaaagcaaaaattggcaaatgagatctaattaaactaaagagctctgcacagcaaaagaaactactgtcagagtgaacaggcaaccaacagaatgggagaaaattttttcaatctatccatatgacaaaggtctaacatccagaatctacaaggaacttaacaaatttacaagaaaaaaggagccccattaaaaagttggcaaagaacatgaacagacacttcccagaagatattcatgtggccaataaacatgaagaaaagctcaacatcactgaccattagagacgtgcatatcaaaatcacaatgagataccatctcatgtcacaatggtgattattaaaaagtcaaacaacatgctagtgaggttgtagagaaataagaacgcttttacactgttggtgggaatgtcaactaattcaaccactgtggaagacagtgtggtgattcctcaaggatttagaaccagaaatatcattactgcatatagacccaaaggaatagaaatcattctattacaaagatacatgcacatgtatgtttattacagcactattcacaatagcaaagacatggaatcaacccaaatgctcatcagtgatagactggaaaaagagaatgtggaacataaacaccatggaatactatgcagcaataaaaaggaatgagatcctgtccttttcagggacatggatggagttggaagctgttatcctcagcaaactaatgcaggaacagaaaaccaaccaccacatgttctcacttataagtgggagctgaacaatagaacacatgggcacagggaggggaataacacacactggggccagtcagggggtggggggtcaagctgagggagagcattagaaaaaatagctaatgcattctgggcttaacccatttatgcctagtgttccatttctggaatgctaagcatgtggaagttctttatatcctgctcaaggtcattgccaaggtctgatttttcacattcaacaaattgcaacctctggcataaatgggttaatacctaggtgatgagttgataggtgcaggaaaccaccatggcacatgtttatctatgtaagaaacctgcacatcctacacatgtaccctggaacttaaaaaatttaaaatatatatgtatatatatttaatatggaattttaaaaattactaatgagttcttttatctgagtaattttgcatcaacatgcttttattatggaagagaagattcagtgagtacaaaattgcagatacatgtgtcagaagatccctgaatataataaggcttagtattctgtgtcataattgcctgtttgtattcctctctggtctttaaacttcattagggcaaggatcaactccatcttactaaccatttgattccctatgtattacacgatatatgaccaataataagccttcaataaatacttgtaaaataaagaatgttatgtaat

SEQ ID NO: 190 - DNA, 1904 bp, Homo sapiens
agctatttcaaggcgcgcgcctcgtggtggactcaccgctagcccgcagcgctcggcttcctggtaattcttcacctcttttctcagctccctgcagcatgggtgctgggccctccttgctgctcgccgccctcctgctgcttctctccggcgacggcgccgtgcgctgcgacacacctgccaactgcacctatcttgacctgctgggcacctgggtcttccaggtgggctccagcggttcccagcgcgatgtcaactgctcggttatgggaccacaagaaaaaaaagtagtggtgtaccttcagaagctggatacagcatatgatgaccttggcaattctggccatttcaccatcatttacaaccaaggctttgagattgtgttgaatgactacaagtggtttgccttttttaagtataaagaagagggcagcaaggtgaccacttactgcaacgagacaatgactgggtgggtgcatgatgtgttgggccggaactgggcttgtttcaccggaaagaaggtgggaactgcctctgagaatgtgtatgtcaacacagcacaccttaagaattctcaggaaaagtattctaataggctctacaagtatgatcacaactttgtgaaagctatcaatgccattcagaagtcttggactgcaactacatacatggaatatgagactcttaccctgggagatatgattaggagaagtggtggccacagtcgaaaaatcccaaggcccaaacctgcaccactgactgctgaaatacagcaaaagattttgcatttgccaacatcttgggactggagaaatgttcatggtatcaattttgtcagtcctgttcgaaaccaagcatcctgtggcagctgctactcatttgcttctatgggtatgctagaagcgagaatccgtatactaaccaacaattctcagaccccaatcctaagccctcaggaggttgtgtcttgtagccagtatgctcaaggctgtgaaggcggcttcccataccttattgcaggaaagtacgcccaagattttgggctggtggaagaagcttgcttcccctacacaggcactgattctccatgcaaaatgaaggaagactgctttcgttattactcctctgagtaccactatgtaggaggtttctatggaggctgcaatgaagccctgatgaagcttgagttggtccatcatgggcccatggcagttgcttttgaagtatatgatgacttcctccactacaaaaaggggatctaccaccacactggtctaagagaccctttcaacccctttgagctgactaatcatgctgttctgcttgtgggctatggcactgactcagcctctgggatggattactggattgttaaaaacagctggggcaccggctggggtgagaatggctacttccggatccgcagaggaactgatgagtgtgcaattgagagcatagcagtggcagccacaccaattcctaaattgtagggtatgccttccagtatttcataatgatctgcatcagttgtaaaggggaattggtatattcacagactgtagactttcagcagcaatctcagaagcttacaaatagatttccatgaagatatttgtcttcagaattaaaactgcccttaattttaatatacctttcaatcggccactggccatttttttctaagtattcaattaagtgggaattttctggaagatggtcagctatgaagtaatagagtttgcttaatcatttgtaattcaaacatgctatattttttaaaatcaatgtgaaaacatagacttatttttaaattgtaccaatcacaagaaaataatggcaataattatcaaaacttttaaaatagatgctcatatttttaaaataaagttttaaaaataactgca

SEQ ID NO: 191 - DNA, 1702 bp, Homo sapiens
aaattttccagccgatcactggagctgacttccgcaatcccgatggaataaatctagcacccctgatggtgtgcccacactttgctgccgaaacgaagccagacaacagatttccatcagcaggatgtgggggctcaaggttctgctgctacctgtggtgagctttgctctgtaccctgaggagatactggacacccactgggagctatggaagaagacccacaggaagcaatataacaacaaggtggatgaaatctctcggcgtttaatttgggaaaaaaacctgaagtatatttccatccataaccttgaggcttctcttggtgtccatacatatgaactggctatgaaccacctgggggacatgaccagtgaagaggtggttcagaagatgactggactcaaagtacccctgtctcattcccgcagtaatgacaccctttatatcccagaatgggaaggtagagccccagactctgtcgactatcgaaagaaaggatatgttactcctgtcaaaaatcagggtcagtgtggttcctgttgggcttttagctctgtgggtgccctggagggccaactcaagaagaaaactggcaaactcttaaatctgagtccccagaacctagtggattgtgtgtctgagaatgatggctgtggagggggctacatgaccaatgccttccaatatgtgcagaagaaccggggtattgactctgaagatgcctacccatatgtgggacaggaagagagttgtatgtacaacccaacaggcaaggcagctaaatgcagagggtacagagagatccccgaggggaatgagaaagccctgaagagggcagtggcccgagtgggacctgtctctgtggccattgatgcaagcctgacctccttccagttttacagcaaaggtgtgtattatgatgaaagctgcaatagcgataatctgaaccatgcggttttggcagtgggatatggaatccagaagggaaacaagcactggataattaaaaacagctggggagaaaactggggaaacaaaggatatatcctcatggctcgaaataagaacaacgcctgtggcattgccaacctggccagcttccccaagatgtgactccagccagccaaatccatcctgctcttccatttcttccacgatggtgcagtgtaacgatgcactttggaagggagttggtgtgctatttttgaagcagatgtggtgatactgagattgtctgttcagtttccccatttgtttgtgcttcaaatgatccttcctactttgcttctctccacccatgacctttttcactgtggccatcaggactttccctgacagctgtgtactcttaggctaagagatgtgactacagcctgcccctgactgtgttgtcccagggctgatgctgtacaggtacaggctggagattttcacataggttagattctcattcacgggactagttagctttaagcaccctagaggactagggtaatctgacttctcacttcctaagttcccttctatatcctcaaggtagaaatgtctatgttttctactccaattcataaatctattcataagtctttggtacaagtttacatgataaaaagaaatgtgatttgtcttcccttctttgcacttttgaaataaagtatttatctcctgtctacagtttaataaatagcatctagtacacat

SEQ ID NO: 192 - DNA, 2943 bp, Homo sapiens
ccgaaagagaaaacaggccgcgcgggcggcagaggagccgggcgccgcaatggacgtgcgggcgctgccgtggctgccgtggctgctgtggctgctgtgccggggcggcggcgatgcggactcccgcgcccccttcaccccgacctggccgcggagccgcgagcgtgaagccgccgccttccgggaaagtcttaatagacatcgatacttgaattctttatttcccagtgaaaactccaccgccttctatggaataaatcagttttcctatttgtttcctgaagagtttaaagccatttatttaagaagcaaaccttccaagtttcccagatactcagcagaagtacatatgtccatccccaatgtgtctttgccgttaagatttgactggagggacaagcaggttgtgacacaagtgagaaaccagcagatgtgtggaggatgctgggccttcagcgtggtgggggcagtggaatctgcttatgcaataaaggggaagcccctggaagacctaagtgtccagcaggtcattgactgttcgtataataattatggctgcaatggaggctctactctcaatgctttgaactggttaaacaagatgcaagtaaaactggtgaaagattcagaatatccttttaaagcacaaaatggtctgtgccattacttttctggttcacattctggattttcaatcaaaggttattctgcatatgacttcagtgaccaagaagatgaaatggcaaaagcacttcttacctttggccctttggtagtcatagtagatgcagtgagctggcaagattatctgggaggcattatacagcatcactgctctagtggagaagcaaatcatgcagttctcataactgggtttgataaaacaggaagcactccatattggattgtgcggaattcctggggaagttcttggggagtagatggttatgcccatgtcaaaatgggaagtaatgtttgtggtattgcagattccgtttcttctatatttgtgtgacatgttgggcagatcaagagacagctacaaaaatgaaggttttcataatgcaatgtaacatagtacttcaaagtattattcaacttcaagtttcagcaactacctacaaaagattctaaggcctagtagtatttaaactaagtttcagaatgttcccttcttgtagagagatggacaaccaaagtcagtgggacaaactccagcacagaagcctgcgaggaagcctatggaatagtttcctgtcctgagacgaaattcagattaggagatattttaggcccctgcaactggggaaggctactgtttgtttttgtttgcttattatttatttgtttgtttattgtgagatatttcaggtgggatcaaagaggtcataagaatttattttcttttgtggggtgtaactactagctttagattacccctatacacaagaatggccaacctaaaattatgtgtgtcttgtacagttagttatattagcagccctctgagatggcgtatctatcggaaggatttcaaacaccaattgctttacctgaacaaatggtgcttaccctttgaacagcagagtgaccacgtagaaggaaggaaaagggcaaaatcgcttcagttaaactgaaattaaatgaacaataaggcaactatataagtaacttctagtagcattgcctgagagacaaattattgtttgataattttcattgtgaataggaatccaatagatcatattgcttactttgttctttttatactatagaataatattttgttctctagtatatcaaaataccaaaatattatctcatattttctccctctttctcttactctttaccaagttttcctggtggcttggcttccctgactaaagaattaagtctcatttttactttccatttctattttcttaccacttggttggctccctttgtctctgtacctttaccaacattaggatctcacctctttcttcctcccttaattcataagcaccactcctatcaaagtcccatctcttaaccctgggtatcaaacaaactgtgagttttccagaatctgtttcccagttttcccctcagctttcctggtctcccatccgaactgcttctttgtgcacctcttgttctttctcttggctcccagtcttgattcctgtgatcactcttgcatcactaattgcacaagtgatttcaggtgcaattctgattagcctgcgtccacacagtgatcgatgatcctatgtgcctagaaaggacactgtgtgctgctcatgacctgcaacaggaaaaaagccatttcttgttagcagtgtaagaaccttagagcaaaggagttgaccttctgattgaatataagcacaaccatattaaatgaatcaatacaagaaaattatttctgatactatgtatgtacatatttcttctctaaaatgtatcattcttttctaatgtatatgatctaacaaaaatgaaacatgaaatgcagtagcaaccactaaaaaaaaaaattcaaggacatctaactttttctctcacttttgccctttgtttatccttccctgtgattagataaacaaaataaaaaacaaaatgctgtatttctcttcttacgccagtcagaaccaatccgaaaagaatgtgtgttgactcaggtttggagttatttcaggaagacagatattgaccttttaattgataaatattcttattatcctggaatgccagaaaagaactatgtcctgcttgtctagtttgtattcgctgactttctatgtgatatagatgcatttgtaatactctttttcaagtgctaaaggatttctaaaatttcaaactgattaatatgtttctgctgttctggattttgatgacatttacaataaaacaacctacatttgactttggtttaaaaagaaaaaaaaaaaa

SEQ ID NO: 193 - DNA, 3108 bp, Homo sapiens
gaaatactcgtctctggtaaagtctgagcaggacagggtggctgactggcagatccagaggttcccttggcagtccacgccaggccttcaccatggatcagttccctgaatcagtgacagaaaactttgagtacgatgatttggctgaggcctgttatattggggacatcgtggtctttgggactgtgttcctgtccatattctactccgtcatctttgccattggcctggtgggaaatttgttggtagtgtttgccctcaccaacagcaagaagcccaagagtgtcaccgacatttacctcctgaacctggccttgtctgatctgctgtttgtagccactttgcccttctggactcactatttgataaatgaaaagggcctccacaatgccatgtgcaaattcactaccgccttcttcttcatcggcttttttggaagcatattcttcatcaccgtcatcagcattgataggtacctggccatcgtcctggccgccaactccatgaacaaccggaccgtgcagcatggcgtcaccatcagcctaggcgtctgggcagcagccattttggtggcagcaccccagttcatgttcacaaagcagaaagaaaatgaatgccttggtgactaccccgaggtcctccaggaaatctggcccgtgctccgcaatgtggaaacaaattttcttggcttcctactccccctgctcattatgagttattgctacttcagaatcatccagacgctgttttcctgcaagaaccacaagaaagccaaagccattaaactgatccttctggtggtcatcgtgtttttcctcttctggacaccctacaacgttatgattttcctggagacgcttaagctctatgacttctttcccagttgtgacatgaggaaggatctgaggctggccctcagtgtgactgagacggttgcatttagccattgttgcctgaatcctctcatctatgcatttgctggggagaagttcagaagatacctttaccacctgtatgggaaatgcctggctgtcctgtgtgggcgctcagtccacgttgatttctcctcatctgaatcacaaaggagcaggcatggaagtgttctgagcagcaattttacttaccacacgagtgatggagatgcattgctccttctctgaagggaatcccaaagccttgtgtctacagagaacctggagttcctgaacctgatgctgactagtgaggaaagatttttgttgttatttcttacaggcacaaaatgatggacccaatgcacacaaaacaaccctagagtgttgttgagaattgtgctcaaaatttgaagaatgaacaaattgaactctttgaatgacaaagagtagacatttctcttactgcaaatgtcatcagaactttttggtttgcagatgacaaaaattcaactcagactagtttagttaaatgagggtggtgaatattgttcatattgtggcacaagcaaaagggtgtctgagccctcaaagtgaggggaaaccagggcctgagccaagctagaattccctctctctgactctcaaatcttttagtcattatagatcccccagactttacatgacacagctttatcaccagagagggactgacacccatgtttctctggccccaagggcaaaattcccagggaagtgctctgataggccaagtttgtatcaggtgcccatccctggaaggtgctgttatccatggggaagggatatataagatggaagcttccagtccaatctcatggagaagcagaaatacatatttccaagaagttggatgggtgggtactattctgattacacaaaacaaatgccacacatcacccttaccatgtgcctgatccagcctctcccctgattacaccagcctcgtcttcattaagccctcttccatcatgtccccaaacctgcaagggctccccactgcctactgcatcgagtcaaaactcaaatgcttggcttctcatacgtccaccatggggtcctaccaatagattccccattgcctcctccttcccaaaggactccacccatcctatcagcctgtctcttccatatgacctcatgcatctccacctgctcccaggccagtaagggaaatagaaaaaccctgcccccaaataagaagggatggattccaaccccaactccagtagcttgggacaaatcaagcttcagtttcctggtctgtagaagagggataaggtacctttcacatagagatcatcctttccagcatgaggaactagccaccaactcttgcaggtctcaacccttttgtctgcctcttagacttctgctttccacacctggcactgctgtgctgtgcccaagttgtggtgctgacaaagcttggaagagcctgcaggtgctgctgcgtggcatagcccagacacagaagaggctggttcttacgatggcacccagtgagcactcccaagtctacagagtgatagccttccgtaacccaactctcctggactgccttgaatatcccctcccagtcaccttgtggcaagcccctgcccatctgggaaaataccccatcattcatgctactgccaacctggggagccagggctatgggagcagcttttttttcccccctagaaacgtttggaacaatctaaaagtttaaagctcgaaaacaattgtaataatgctaaagaaaaagtcatccaatctaaccacatcaatattgtcattcctgtattcacccgtccagaccttgttcacactctcacatgtttagagttgcaatcgtaatgtacagatggttttataatctgatttgttttcctcttaacgttagaccacaaatagtgctcgctttctatgtagtttggtaattatcattttagaagactctaccagactgtgtattcattgaagtcagatgtggtaactgttaaattgctgtgtatctgatagctctttggcagtctatatgtttgtataatgaatgagagaataagtcatgttccttcaagatcatgtaccccaatttacttgccattactcaattgataaacatttaacttgtttccaatgtttagcaaatacatattttatagaacttcca

SEQ ID NO: 194 - DNA, 1103 bp, Homo sapiens
cacagagcccgggccgcaggcacctcctcgccagctcttccgctcctctcacagccgccagacccgcctgctgagccccatggcccgcgctgctctctccgccgcccccagcaatccccggctcctgcgagtggcactgctgctcctgctcctggtagccgctggccggcgcgcagcaggagcgtccgtggccactgaactgcgctgccagtgcttgcagaccctgcagggaattcaccccaagaacatccaaagtgtgaacgtgaagtcccccggaccccactgcgcccaaaccgaagtcatagccacactcaagaatgggcggaaagcttgcctcaatcctgcatcccccatagttaagaaaatcatcgaaaagatgctgaacagtgacaaatccaactgaccagaagggaggaggaagctcactggtggctgttcctgaaggaggccctgcccttataggaacagaagaggaaagagagacacagctgcagaggccacctggattgtgcctaatgtgtttgagcatcgcttaggagaagtcttctatttatttatttattcattagttttgaagattctatgttaatattttaggtgtaaaataattaagggtatgattaactctacctgcacactgtcctattatattcattctttttgaaatgtcaaccccaagttagttcaatctggattcatatttaatttgaaggtagaatgttttcaaatgttctccagtcattatgttaatatttctgaggagcctgcaacatgccagccactgtgatagaggctggcggatccaagcaaatggccaatgagatcattgtgaaggcaggggaatgtatgtgcacatctgttttgtaactgtttagatgaatgtcagttgttatttattgaaatgatttcacagtgtgtggtcaacatttctcatgttgaaactttaagaactaaaatgttctaaatatcccttggacattttatgtctttcttgtaaggcatactgccttgtttaatggtagttttacagtgtttctggcttagaacaaaggggcttaattattgatgttttcatagagaatataaaaataaagcacttatag

SEQ ID NO: 195 - DNA, 1184 bp, Homo sapiens
gggggagacattcctcaattgcttagacatattctgagcctacagcagaggaacctccagtctcagcaccatgaatcaaactgccattctgatttgctgccttatctttctgactctaagtggcattcaaggagtacctctctctagaactgtacgctgtacctgcatcagcattagtaatcaacctgttaatccaaggtctttagaaaaacttgaaattattcctgcaagccaattttgtccacgtgttgagatcattgctacaatgaaaaagaagggtgagaagagatgtctgaatccagaatcgaaggccatcaagaatttactgaaagcagttagcaaggaaaggtctaaaagatctccttaaaaccagaggggagcaaaatcgatgcagtgcttccaaggatggaccacacagaggctgcctctcccatcacttccctacatggagtatatgtcaagccataattgttcttagtttgcagttacactaaaaggtgaccaatgatggtcaccaaatcagctgctactactcctgtaggaaggttaatgttcatcatcctaagctattcagtaataactctaccctggcactataatgtaagctctactgaggtgctatgttcttagtggatgttctgaccctgcttcaaatatttccctcacctttcccatcttccaagggtactaaggaatctttctgctttggggtttatcagaattctcagaatctcaaataactaaaaggtatgcaatcaaatctgctttttaaagaatgctctttacttcatggacttccactgccatcctcccaaggggcccaaattctttcagtggctacctacatacaattccaaacacatacaggaaggtagaaatatctgaaaatgtatgtgtaagtattcttatttaatgaaagactgtacaaagtagaagtcttagatgtatatatttcctatattgttttcagtgtacatggaataacatgtaattaagtactatgtatcaatgagtaacaggaaaattttaaaaatacagatagatatatgctctgcatgttacataagataaatgtgctgaatggttttcaaaataaaaatgaggtactctcctggaaatattaagaaagactatctaaatgttgaaagatcaaaaggttaataaagtaattataactaaaaaaa

SEQ ID NO: 196 - DNA, 1493 bp, Homo sapiens
ttcctttcatgttcagcatttctactccttccaagaagagcagcaaagctgaagtagcagcaacagcaccagcagcaacagcaaaaaacaaacatgagtgtgaagggcatggctatagccttggctgtgatattgtgtgctacagttgttcaaggcttccccatgttcaaaagaggacgctgtctttgcataggccctggggtaaaagcagtgaaagtggcagatattgagaaagcctccataatgtacccaagtaacaactgtgacaaaatagaagtgattattaccctgaaagaaaataaaggacaacgatgcctaaatcccaaatcgaagcaagcaaggcttataatcaaaaaagttgaaagaaagaatttttaaaaatatcaaaacatatgaagtcctggaaaagggcatctgaaaaacctagaacaagtttaactgtgactactgaaatgacaagaattctacagtaggaaactgagacttttctatggttttgtgactttcaacttttgtacagttatgtgaaggatgaaaggtgggtgaaaggaccaaaaacagaaatacagtcttcctgaatgaatgacaatcagaattccactgcccaaaggagtccagcaattaaatggatttctaggaaaagctaccttaagaaaggctggttaccatcggagtttacaaagtgctttcacgttcttacttgttgtattatacattcatgcatttctaggctagagaaccttctagatttgatgcttacaactattctgttgtgactatgagaacatttctgtctctagaagttatctgtctgtattgatctttatgctatattactatctgtggttacagtggagacattgacattattactggagtcaagcccttataagtcaaaagcatctatgtgtcgtaaagcattcctcaaacattttttcatgcaaatacacacttctttccccaaatatcatgtagcacatcaatatgtagggaaacattcttatgcatcatttggtttgttttataaccaattcattaaatgtaattcataaaatgtactatgaaaaaaattatacgctatgggatactggcaacagtgcacatatttcataaccaaattagcagcaccggtcttaatttgatgtttttcaacttttattcattgagatgttttgaagcaattaggatatgtgtgtttactgtactttttgttttgatccgtttgtataaatgatagcaatatcttggacacatttgaaatacaaaatgtttttgtctaccaaagaaaaatgttgaaaaataagcaaatgtatacctagcaatcacttttactttttgtaattctgtctcttagaaaaatacataatctaatcaatttctttgttcatgcctatatactgtaaaatttaggtatactcaagactagtttaaagaatcaaagtcatttttttctctaataaactaccacaacctttcttttttaaaaaaaaaaa

SEQ ID NO: 197 - DNA, 3542 bp, Homo sapiens
gcactttcactctccgtcagccgcattgcccgctcggcgtccggcccccgacccgcgctcgtccgcccgcccgcccgcccgcccgcgccatgaacgccaaggtcgtggtcgtgctggtcctcgtgctgaccgcgctctgcctcagcgacgggaagcccgtcagcctgagctacagatgcccatgccgattcttcgaaagccatgttgccagagccaacgtcaagcatctcaaaattctcaacactccaaactgtgcccttcagattgtagcccggctgaagaacaacaacagacaagtgtgcattgacccgaagctaaagtggattcaggagtacctggagaaagctttaaacaagaggttcaagatgtgagagggtcagacgcctgaggaacccttacagtaggagcccagctctgaaaccagtgttagggaagggcctgccacagcctcccctgccagggcagggccccaggcattgccaagggctttgttttgcacactttgccatattttcaccatttgattatgtagcaaaatacatgacatttatttttcatttagtttgattattcagtgtcactggcgacacgtagcagcttagactaaggccattattgtacttgccttattagagtgtctttccacggagccactcctctgactcagggctcctgggttttgtattctctgagctgtgcaggtggggagactgggctgagggagcctggccccatggtcagccctagggtggagagccaccaagagggacgcctgggggtgccaggaccagtcaacctgggcaaagcctagtgaaggcttctctctgtgggatgggatggtggagggccacatgggaggctcacccccttctccatccacatgggagccgggtctgcctcttctgggagggcagcagggctaccctgagctgaggcagcagtgtgaggccagggcagagtgagacccagccctcatcccgagcacctccacatcctccacgttctgctcatcattctctgtctcatccatcatcatgtgtgtccacgactgtctccatggccccgcaaaaggactctcaggaccaaagctttcatgtaaactgtgcaccaagcaggaaatgaaaatgtcttgtgttacctgaaaacactgtgcacatctgtgtcttgtttggaatattgtccattgtccaatcctatgtttttgttcaaagccagcgtcctcctctgtgaccaatgtcttgatgcatgcactgttccccctgtgcagccgctgagcgaggagatgctccttgggccctttgagtgcagtcctgatcagagccgtggtcctttggggtgaactaccttggttcccccactgatcacaaaaacatggtgggtccatgggcagagcccaagggaattcggtgtgcaccagggttgaccccagaggattgctgccccatcagtgctccctcacatgtcagtaccttcaaactagggccaagcccagcactgcttgaggaaaacaagcattcacaacttgtttttggtttttaaaacccagtccacaaaataaccaatcctggacatgaagattctttcccaattcacatctaacctcatcttcttcaccatttggcaatgccatcatctcctgccttcctcctgggccctctctgctctgcgtgtcacctgtgcttcgggcccttcccacaggacatttctctaagagaacaatgtgctatgtgaagagtaagtcaacctgcctgacatttggagtgttccccttccactgagggcagtcgatagagctgtattaagccacttaaaatgttcacttttgacaaaggcaagcacttgtgggtttttgttttgtttttcattcagtcttacgaatacttttgccctttgattaaagactccagttaaaaaaaattttaatgaagaaagtggaaaacaaggaagtcaaagcaaggaaactatgtaacatgtaggaagtaggaagtaaattatagtgatgtaatcttgaattgtaactgttcttgaatttaataatctgtagggtaattagtaacatgtgttaagtattttcataagtatttcaaattggagcttcatggcagaaggcaaacccatcaacaaaaattgtcccttaaacaaaaattaaaatcctcaatccagctatgttatattgaaaaaatagagcctgagggatctttactagttataaagatacagaactctttcaaaaccttttgaaattaacctctcactataccagtataattgagttttcagtggggcagtcattatccaggtaatccaagatattttaaaatctgtcacgtagaacttggatgtacctgcccccaatccatgaaccaagaccattgaattcttggttgaggaaacaaacatgaccctaaatcttgactacagtcaggaaaggaatcatttctatttctcctccatgggagaaaatagataagagtagaaactgcagggaaaattatttgcataacaattcctctactaacaatcagctccttcctggagactgcccagctaaagcaatatgcatttaaatacagtcttccatttgcaagggaaaagtctcttgtaatccgaatctctttttgctttcgaactgctagtcaagtgcgtccacgagctgtttactagggatccctcatctgtccctccgggacctggtgctgcctctacctgacactcccttgggctccctgtaacctcttcagaggccctcgctgccagctctgtatcaggacccagaggaaggggccagaggctcgttgactggctgtgtgttgggattgagtctgtgccacgtgtttgtgctgtggtgtgtccccctctgtccaggcactgagataccagcgaggaggctccagagggcactctgcttgttattagagattacctcctgagaaaaaaggttccgcttggagcagaggggctgaatagcagaaggttgcacctcccccaaccttagatgttctaagtctttccattggatctcattggacccttccatggtgtgatcgtctgactggtgttatcaccgtgggctccctgactgggagttgatcgcctttcccaggtgctacacccttttccagctggatgagaatttgagtgctctgatccctctacagagcttccctgactcattctgaaggagccccattcctgggaaatattccctagaaacttccaaatcccctaagcagaccactgataaaaccatgtagaaaatttgttattttgcaacctcgctggactctcagtctctgagcagtgaatgattcagtgttaaatgtgatgaatactgtattttgtattgtttcaattgcatctcccagataatgtgaaaatggtccaggagaaggccaattcctatacgcagcgtgctttaaaaaataaataagaaacaactctttgagaaacaacaatttctactttgaagtcataccaatgaaaaaatgtatatgcacttataattttcctaataaagttctgtactcaaatgtagccaccaa

SEQ ID NO: 198 - DNA, 1234 bp, Homo sapiens
gagctccgggaatttccctggcccgggactccgggctttccagccccaaccatgcataaaaggggttcgccgttctcggagagccacagagcccgggccacaggcagctccttgccagctctcctcctcgcacagccgctcgaaccgcctgctgagccccatggcccgcgccacgctctccgccgcccccagcaatccccggctcctgcgggtggcgctgctgctcctgctcctggtggccgccagccggcgcgcagcaggagcgcccctggccactgaactgcgctgccagtgcttgcagaccctgcagggaattcacctcaagaacatccaaagtgtgaaggtgaagtcccccggaccccactgcgcccaaaccgaagtcatagccacactcaagaatgggcagaaagcttgtctcaaccccgcatcgcccatggttaagaaaatcatcgaaaagatgctgaaaaatggcaaatccaactgaccagaaggaaggaggaagcttattggtggctgttcctgaaggaggccctgcccttacaggaacagaagaggaaagagagacacagctgcagaggccacctggattgcgcctaatgtgtttgagcatcacttaggagaagtcttctatttatttatttatttatttatttgtttgttttagaagattctatgttaatattttatgtgtaaaataaggttatgattgaatctacttgcacactctcccattatatttattgtttattttaggtcaaacccaagttagttcaatcctgattcatatttaatttgaagatagaaggtttgcagatattctctagtcatttgttaatatttcttcgtgatgacatatcacatgtcagccactgtgatagaggctgaggaatccaagaaaatggccagtgagatcaatgtgacggcagggaaatgtatgtgtgtctattttgtaactgtaaagatgaatgtcagttgttatttattgaaatgatttcacagtgtgtggtcaacatttctcatgttgaagctttaagaactaaaatgttctaaatatcccttggacattttatgtctttcttgtaaggcatactgccttgtttaatgttaattatgcagtgtttccctctgtgttagagcagagaggtttcgatatttattgatgttttcacaaagaacaggaaaataaaatatttaaaaatataaaaaaaaaaaaaaaaaaaaaaaaaaaaaaaaa

SEQ ID NO: 199 - DNA, 1166 bp, Homo sapiens
gctccgggaatttccctggcccggccgctccgggctttccagtctcaaccatgcataaaaagggttcgccgatcttggggagccacacagcccgggtcgcaggcacctccccgccagctctcccgcttctcgcacagcttcccgacgcgtctgctgagccccatggcccacgccacgctctccgccgcccccagcaatccccggctcctgcgggtggcgctgctgctcctgctcctggtggccgccagccggcgcgcagcaggagcgtccgtggtcactgaactgcgctgccagtgcttgcagacactgcagggaattcacctcaagaacatccaaagtgtgaatgtaaggtcccccggaccccactgcgcccaaaccgaagtcatagccacactcaagaatgggaagaaagcttgtctcaaccccgcatcccccatggttcagaaaatcatcgaaaagatactgaacaaggggagcaccaactgacaggagagaagtaagaagcttatcagcgtatcattgacacttcctgcagggtggtccctgcccttaccagagctgaaaatgaaaaagagaacagcagctttctagggacagctggaaaggacttaatgtgtttgactatttcttacgagggttctacttatttatgtatttatttttgaaagcttgtattttaatattttacatgctgttatttaaagatgtgagtgtgtttcatcaaacatagctcagtcctgattatttaattggaatatgatgggttttaaatgtgtcattaaactaatatttagtgggagaccataatgtgtcagccaccttgataaatgacagggtggggaactggagggtggggggattgaaatgcaagcaattagtggatcactgttagggtaagggaatgtatgtacacatctattttttatactttttttttaaaaaaagaatgtcagttgttatttattcaaattatctcacattatgtgttcaacatttttatgctgaagtttcccttagacattttatgtcttgcttgtagggcataatgccttgtttaatgtccattctgcagcgtttctctttcccttggaaaagagaatttatcattactgttacatttgtacaaatgacatgataataaaagttttatgaaaaaaaaaaaaaaa

SEQ ID NO: 200 - DNA, 2475 bp, Homo sapiens
gtgcagaaggcacgaggaagccacagtgctccggatcctccaatcttcgctcctccaatctccgctcctccacccagttcaggaacccgcgaccgctcgcagcgctctcttgaccactatgagcctcctgtccagccgcgcggcccgtgtccccggtccttcgagctccttgtgcgcgctgttggtgctgctgctgctgctgacgcagccagggcccatcgccagcgctggtcctgccgctgctgtgttgagagagctgcgttgcgtttgtttacagaccacgcaaggagttcatcccaaaatgatcagtaatctgcaagtgttcgccataggcccacagtgctccaaggtggaagtggtagcctccctgaagaacgggaaggaaatttgtcttgatccagaagccccttttctaaagaaagtcatccagaaaattttggacggtggaaacaaggaaaactgattaagagaaatgagcacgcatggaaaagtttcccagtcttcagcagagaagttttctggaggtctctgaacccagggaagacaagaaggaaagattttgttgttgtttgtttatttgtttttccagtagttagctttcttcctggattcctcactttgaagagtgtgaggaaaacctatgtttgccgcttaagctttcagctcagctaatgaagtgtttagcatagtacctctgctatttgctgttattttatctgctatgctattgaagttttggcaattgactatagtgtgagccaggaatcactggctgttaatctttcaaagtgtcttgaattgtaggtgactattatatttccaagaaatattccttaagatattaactgagaaggctgtggatttaatgtggaaatgatgtttcataagaattctgttgatggaaatacactgttatcttcacttttataagaaataggaaatattttaatgtttcttggggaatatgttagagaatttccttactcttgattgtgggatactatttaattatttcactttagaaagctgagtgtttcacaccttatctatgtagaatatatttccttattcagaatttctaaaagtttaagttctatgagggctaatatcttatcttcctataattttagacattctttatctttttagtatggcaaactgccatcatttacttttaaactttgattttatatgctatttattaagtattttattaggagtaccataattctggtagctaaatatatattttagatagatgaagaagctagaaaacaggcaaattcctgactgctagtttatatagaaatgtattcttttagtttttaaagtaaaggcaaacttaacaatgacttgtactctgaaagttttggaaacgtattcaaacaatttgaatataaatttatcatttagttataaaaatatatagcgacatcctcgaggccctagcatttctccttggataggggaccagagagagcttggaatgttaaaaacaaaacaaaacaaaaaaaaacaaggagaagttgtccaagggatgtcaattttttatccctctgtatgggttagattttccaaaatcataatttgaagaaggccagcatttatggtagaatatataattatatataaggtggccacgctggggcaagttccctccccactcacagctttggcccctttcacagagtagaacctgggttagaggattgcagaagacgagcggcagcggggagggcagggaagatgcctgtcgggtttttagcacagttcatttcactgggattttgaagcatttctgtctgaatgtaaagcctgttctagtcctggtgggacacactggggttgggggtgggggaagatgcggtaatgaaaccggttagtcagtgttgtcttaatatccttgataatgctgtaaagtttatttttacaaatatttctgtttaagctatttcacctttgtttggaaatccttcccttttaaagagaaaatgtgacacttgtgaaaaggcttgtaggaaagctcctccctttttttctttaaacctttaaatgacaaacctaggtaattaatggttgtgaatttctatttttgctttgtttttaatgaacatttgtctttcagaataggattctgtgataatatttaaatggcaaaaacaaaacataattttgtgcaattaacaaagctactgcaagaaaaataaaacatttcttggtaaaaacgtatgtatttatatattatatatttatatataatatatattatatatttagcattgctgagctttttagatgcctattgtgtatcttttaaaggttttgaccattttgttatgagtaattacatatatattacattcactatattaaaattgtacttttttactatgtgtctcattggttcatagtctttattttgtcctttgaataaacattaaaagatttctaaacttcaaaaaaaaaaaaaaaaaa

SEQ ID NO: 201 - DNA, 1539 bp, Homo sapiens
ccagtctccgcgcctccacccagctcaggaacccgcgaaccctctcttgaccactatgagcctcccgtccagccgcgcggcccgtgtcccgggtccttcgggctccttgtgcgcgctgctcgcgctgctgctcctgctgacgccgccggggcccctcgccagcgctggtcctgtctctgctgtgctgacagagctgcgttgcacttgtttacgcgttacgctgagagtaaaccccaaaacgattggtaaactgcaggtgttccccgcaggcccgcagtgctccaaggtggaagtggtagcctccctgaagaacgggaagcaagtttgtctggacccggaagccccttttctaaagaaagtcatccagaaaattttggacagtggaaacaagaaaaactgagtaacaaaaaagaccatgcatcataaaattgcccagtcttcagcggagcagttttctggagatccctggacccagtaagaataagaaggaagggttggtttttttccattttctacatggattccctactttgaagagtgtgggggaaagcctacgcttctccctgaagtttacagctcagctaatgaagtactaatatagtatttccactatttactgttattttacctgataagttattgaaccctttggcaattgaccatattgtgagcaaagaatcactggttattagtctttcaatgaatattgaattgaagataactattgtatttctatcatacattccttaaagtcttaccgaaaaggctgtggatttcgtatggaaataatgttttattagtgtgctgttgagggaggtatcctgttgttcttactcactcttctcataaaataggaaatattttagttctgttttcttggggaatatgttactctttaccctaggatgctatttaagttgtactgtattagaacactgggtgtgtcataccgttatctgtgcagaatatatttccttattcagaatttctaaaaatttaagttctgtaagggctaatatattctcttcctatggttttagatgtttgatgtcttcttagtatggcataatgtcatgatttactcattaaactttgattttgtatgctattttttcactataggatgactataattctggtcactaaatatacactttagatagatgaagaagcccaaaaacagataaattcctgattgctaatttacatagaaatgtattctcttggttttttaaataaaagcaaaattaacaatgatctgtgctctgcaaagttttgaaaatatatttgaacaatttgaatataaattcatcatttagtcctcaaaatatatacagcattgctaagattttcagatatctattgtggatcttttaaaggttttgaccattttgttatgaggaattatacatgtatcacattcactatattaaaattgcacttttattttttcctgtgtgtcatgttggtttttggtacttgtattgtcatttggagaaacaataaaagatttctaaaccaaaaaaaaaaaaaaaaaaa

SEQ ID NO: 202 - DNA, 2545 bp, Homo sapiens
atccaatacaggagtgacttggaactccattctatcactatgaagaaaagtggtgttcttttcctcttgggcatcatcttgctggttctgattggagtgcaaggaaccccagtagtgagaaagggtcgctgttcctgcatcagcaccaaccaagggactatccacctacaatccttgaaagaccttaaacaatttgccccaagcccttcctgcgagaaaattgaaatcattgctacactgaagaatggagttcaaacatgtctaaacccagattcagcagatgtgaaggaactgattaaaaagtgggagaaacaggtcagccaaaagaaaaagcaaaagaatgggaaaaaacatcaaaaaaagaaagttctgaaagttcgaaaatctcaacgttctcgtcaaaagaagactacataagagaccacttcaccaataagtattctgtgttaaaaatgttctattttaattataccgctatcattccaaaggaggatggcatataatacaaaggcttattaatttgactagaaaatttaaaacattactctgaaattgtaactaaagttagaaagttgattttaagaatccaaacgttaagaattgttaaaggctatgattgtctttgttcttctaccacccaccagttgaatttcatcatgcttaaggccatgattttagcaatacccatgtctacacagatgttcacccaaccacatcccactcacaacagctgcctggaagagcagccctaggcttccacgtactgcagcctccagagagtatctgaggcacatgtcagcaagtcctaagcctgttagcatgctggtgagccaagcagtttgaaattgagctggacctcaccaagctgctgtggccatcaacctctgtatttgaatcagcctacaggcctcacacacaatgtgtctgagagattcatgctgattgttattgggtatcaccactggagatcaccagtgtgtggctttcagagcctcctttctggctttggaagccatgtgattccatcttgcccgctcaggctgaccactttatttctttttgttcccctttgcttcattcaagtcagctcttctccatcctaccacaatgcagtgcctttcttctctccagtgcacctgtcatatgctctgatttatctgagtcaactcctttctcatcttgtccccaacaccccacagaagtgctttcttctcccaattcatcctcactcagtccagcttagttcaagtcctgcctcttaaataaacctttttggacacacaaattatcttaaaactcctgtttcacttggttcagtaccacatgggtgaacactcaatggttaactaattcttgggtgtttatcctatctctccaaccagattgtcagctccttgagggcaagagccacagtatatttccctgtttcttccacagtgcctaataatactgtggaactaggttttaataattttttaattgatgttgttatgggcaggatggcaaccagaccattgtctcagagcaggtgctggctctttcctggctactccatgttggctagcctctggtaacctcttacttattatcttcaggacactcactacagggaccagggatgatgcaacatccttgtctttttatgacaggatgtttgctcagcttctccaacaataagaagcacgtggtaaaacacttgcggatattctggactgtttttaaaaaatatacagtttaccgaaaatcatataatcttacaatgaaaaggactttatagatcagccagtgaccaaccttttcccaaccatacaaaaattccttttcccgaaggaaaagggctttctcaataagcctcagctttctaagatctaacaagatagccaccgagatccttatcgaaactcattttaggcaaatatgagttttattgtccgtttacttgtttcagagtttgtattgtgattatcaattaccacaccatctcccatgaagaaagggaacggtgaagtactaagcgctagaggaagcagccaagtcggttagtggaagcatgattggtgcccagttagcctctgcaggatgtggaaacctccttccaggggaggttcagtgaattgtgtaggagaggttgtctgtggccagaatttaaacctatactcactttcccaaattgaatcactgctcacactgctgatgatttagagtgctgtccggtggagatcccacccgaacgtcttatctaatcatgaaactccctagttccttcatgtaacttccctgaaaaatctaagtgtttcataaatttgagagtctgtgacccacttaccttgcatctcacaggtagacagtatataactaacaaccaaagactacatattgtcactgacacacacgttataatcatttatcatatatatacatacatgcatacactctcaaagcaaataatttttcacttcaaaacagtattgacttgtataccttgtaatttgaaatattttctttgttaaaatagaatggtatcaataaatagaccattaatcag

SEQ ID NO: 203 - DNA, 2059 bp, Homo sapiens
gtggatatccccgagtcaccgcgtccctctcctgcagctcccgcgtcgctgggaggagcgagggagcgagcgggaaggggtctagctggcctttgctcggccctccccagcgcccggctttgaacccgccctgcactgctgtctgggcgggtccggggactcagcactcgacccaaaggtgcaggcgcgcgagcacaacccatggctgcgctgggctgcgcgaggctgaggtgggcgctgcgaggggccggccgtggcctctgcccccacggggccagagccaaggccgcgatccctgccgccctcccctcggacaaggccaccggagctcccggagccgggcctggtgtccggcggcggcaacggagcttagaggagattccacgtctaggacagctgcgcttcttctttcagctgttcgttcaaggctatgccctgcaactgcaccagttacaggtgctttacaaggccaagtacggtccaatgtggatgtcctacttagggcctcagatgcacgtgaacctggccagtgccccgctcttggagcaagtgatgcggcaagagggaaagtacccagtacggaacgacatggagctatggaaggagcaccgggaccagcacgacctgacctatgggccgttcaccacggaaggacaccactggtaccagctgcgccaggctctgaaccagcggttgctgaagccagcggaagcagcgctctatacggatgctttcaatgaggtgattgatgactttatgactcgactggaccagctgcgggcagagagtgcttcggggaaccaggtgtcggacatggctcaactcttctactactttgccttggaagctatttgctacatcctgttcgagaaacgcattggctgcctgcagcgatccatccccgaggacaccgtgaccttcgtcagatccatcgggttaatgttccagaactcactctatgccaccttcctccccaagtggactcgccccgtgctgcctttctggaagcgatacctggatggttggaatgccatcttttcctttgggaagaagctgattgatgagaagctcgaagatatggaggcccaactgcaggcagcagggccagatggcatccaggtgtctggctacctgcacttcttactggccagtggacagctcagtcctcgggaggccatgggcagcctgcctgagctgctcatggctggagtggacacgacatccaacacgctgacatgggccctgtaccacctctcaaaggaccctgagatccaggaggccttgcacgaggaagtggtgggtgtggtgccagccgggcaagtgccccagcacaaggactttgcccacatgccgttgctcaaagctgtgcttaaggagactctgcgtctctaccctgtggtccccacaaactcccggatcatagaaaaggaaattgaagttgatggcttcctcttccccaagaacacccagtttgtgttctgccactatgtggtgtcccgggaccccactgccttctctgagcctgaaagcttccagccccaccgctggctgagaaacagccagcctgctacccccaggatccagcacccatttggctctgtgccctttggctatggggtccgggcctgcctgggccgcaggattgcagagctggagatgcagctactcctcgcaaggctgatccagaagtacaaggtggtcctggccccggagacgggggagttgaagagtgtggcccgcattgtcctggttcccaataagaaagtgggcctgcagttcctgcagagacagtgctgagctgagtctccgccttgctggggcttgtcctagaggctccagctctggcacagtggttcctggctgctgccatgtctcagatgaggagggagagaaggaggccgccagactcgagaggtgggaggaactccttgcacacaccctgagcttttgccacttctatcatttttgagcaactccctctcagctaaaaggccacccctttatcgcattgctgtccttgggtagaatataaaataaagggacttttatttcttattgg

SEQ ID NO: 204 - DNA, 1995 bp, Homo sapiens
ggcaccggaaagaacaagaaaaaagaacaccttatttttatcttcttcagtgagccaatgttcattcaaaagagagattaaagtgctttttgctgactagtcacagtcagagtcagaatcacaggtggattagtagggagtgttataaaagccttgaagtgaaagcccgcagttgtcttactaagaagagaagccttcaatggatccagctgtggctctggtgctctgtctctcctgtttgtttctcctttcactctggaggcagagctctggaagagggaggctcccgtctggccccactcctctcccgattattggaaatatcctgcagttagatgttaaggacatgagcaaatccttaaccaatttctcaaaagtctatggccctgtgttcactgtgtattttggcctgaagcccattgtggtgttgcatggatatgaagcagtgaaggaggccctgattgatcatggagaggagttttctggaagaggaagttttccagtggctgaaaaagttaacaaaggacttggaatccttttcagcaatggaaagagatggaaggagatccggcgtttctgcctcatgactctgcggaattttgggatggggaagaggagcatcgaggaccgtgttcaagaggaagcccgctgccttgtggaggagttgagaaaaaccaatgcctcaccctgtgatcccactttcatcctgggctgtgctccctgcaatgtgatctgctctgttattttccatgatcgatttgattataaagatcagaggtttcttaacttgatggaaaaattcaatgaaaacctcaggattctgagctctccatggatccaggtctgcaataatttccctgctctcatcgattatctcccaggaagtcataataaaatagctgaaaattttgcttacattaaaagttatgtattggagagaataaaagaacatcaagaatccctggacatgaacagtgctcgggactttattgattgtttcctgatcaaaatggaacaggaaaagcacaatcaacagtctgaatttactgttgaaagcttgatagccactgtaactgatatgtttggggctggaacagagacaacgagcaccactctgagatatggactcctgctcctgctgaagtacccagaggtcacagctaaagtccaggaagagattgaatgtgtagttggcagaaaccggagcccctgtatgcaggacaggagtcacatgccctacacagatgctgtggtgcacgagatccagagatacattgacctcctccccaccaacctgccccatgcagtgacctgtgatgttaaattcaaaaactacctcatccccaagggcacgaccataataacatccctgacttctgtgctgcacaatgacaaagaattccccaacccagagatgtttgaccctggccactttctggataagagtggcaactttaagaaaagtgactacttcatgcctttctcagcaggaaaacggatgtgtatgggagagggcctggcccgcatggagctgtttttattcctgaccaccattttgcagaactttaacctgaaatctcaggttgacccaaaggatattgacatcacccccattgccaatgcatttggtcgtgtgccacccttgtaccagctctgcttcattcctgtctgaagaagggcagatagtttggctgctcctgtgctgtcacctgcaattctcccttatcagggccattagcctctcccttctctctgtgagggatattttctctgacttgtcaatccacatcttcccattccctcaagatccaatgaacatccaacctccattaaagagagtttcttgggtcacttcctaaatatatctgctattctccatactctgtatcacttgtattgaccaccacatatgctaatacctatctactgctgagttgtcagtatgttatcactagaaaacaaagaaaaatgattaataaatgacaattcagagcc

SEQ ID NO: 205 - DNA, 1835 bp, Homo sapiens
atggattctcttgtggtccttgtgctctgtctctcatgtttgcttctcctttcactctggagacagagctctgggagaggaaaactccctcctggccccactcctctcccagtgattggaaatatcctacagataggtattaaggacatcagcaaatccttaaccaatctctcaaaggtctatggcccggtgttcactctgtattttggcctgaaacccatagtggtgctgcatggatatgaagcagtgaaggaagccctgattgatcttggagaggagttttctggaagaggcattttcccactggctgaaagagctaacagaggatttggaattgttttcagcaatggaaagaaatggaaggagatccggcgtttctccctcatgacgctgcggaattttgggatggggaagaggagcattgaggaccgtgttcaagaggaagcccgctgccttgtggaggagttgagaaaaaccaaggcctcaccctgtgatcccactttcatcctgggctgtgctccctgcaatgtgatctgctccattattttccataaacgttttgattataaagatcagcaatttcttaacttaatggaaaagttgaatgaaaacatcaagattttgagcagcccctggatccagatctgcaataatttttctcctatcattgattacttcccgggaactcacaacaaattacttaaaaacgttgcttttatgaaaagttatattttggaaaaagtaaaagaacaccaagaatcaatggacatgaacaaccctcaggactttattgattgcttcctgatgaaaatggagaaggaaaagcacaaccaaccatctgaatttactattgaaagcttggaaaacactgcagttgacttgtttggagctgggacagagacgacaagcacaaccctgagatatgctctccttctcctgctgaagcacccagaggtcacagctaaagtccaggaagagattgaacgtgtgattggcagaaaccggagcccctgcatgcaagacaggagccacatgccctacacagatgctgtggtgcacgaggtccagagatacattgaccttctccccaccagcctgccccatgcagtgacctgtgacattaaattcagaaactatctcattcccaagggcacaaccatattaatttccctgacttctgtgctacatgacaacaaagaatttcccaacccagagatgtttgaccctcatcactttctggatgaaggtggcaattttaagaaaagtaaatacttcatgcctttctcagcaggaaaacggatttgtgtgggagaagccctggccggcatggagctgtttttattcctgacctccattttacagaactttaacctgaaatctctggttgacccaaagaaccttgacaccactccagttgtcaatggatttgcctctgtgccgcccttctaccagctgtgcttcattcctgtctgaagaagagcagatggcctggctgctgctgtgcagtccctgcagctctctttcctctggggcattatccatctttgcactatctgtaatgccttttctcacctgtcatctcacattttcccttccctgaagatctagtgaacattcgacctccattacggagagtttcctatgtttcactgtgcaaatatatctgctattctccatactctgtaacagttgcattgactgtcacataatgctcatacttatctaatgtagagtattaatatgttattattaaatagagaaatatgatttgtgtattataattcaaaggcatttcttttctgcatgatctaaataaaaagcattattatttgctg

SEQ ID NO: 206 - DNA, 1725 bp, Homo sapiens
aaagacctcccagcagaagaggagaagaggttgtgtgggacaagctgctcccgacagaaggatgtcgctgctgagcctgccctggctgggcctcagaccggtggcaatgtccccatggctactcctgctgctggttgtgggctcctggctactcgcccgcatcctggcttggacctatgccttctataacaactgccgccggctccagtgtttcccacagcccccaaaacggaactggttttggggtcacctgggcctgatcactcctacagaggagggcttgaaggactcgacccagatgtcggccacctattcccagggctttacggtatggctgggtcccatcatccccttcatcgttttatgccaccctgacaccatccggtctatcaccaatgcctcagctgccattgcacccaaggataatctcttcatcaggttcctgaagccctggctgggagaagggatactgctgagtggcggtgacaagtggagccgccaccgtcggatgctgacgcccgccttccatttcaacatcctgaagtcctatataacgatcttcaacaagagtgcaaacatcatgcttgacaagtggcagcacctggcctcagagggcagcagtcgtctggacatgtttgagcacatcagcctcatgaccttggacagtctacagaaatgcatcttcagctttgacagccattgtcaggagaggcccagtgaatatattgccaccatcttggagctcagtgcccttgtagagaaaagaagccagcatatcctccagcacatggactttctgtattacctctcccatgacgggcggcgcttccacagggcctgccgcctggtgcatgacttcacagacgctgtcatccgggagcggcgtcgcaccctccccactcagggtattgatgattttttcaaagacaaagccaagtccaagactttggatttcattgatgtgcttctgctgagcaaggatgaagatgggaaggcattgtcagatgaggatataagagcagaggctgacaccttcatgtttggaggccatgacaccacggccagtggcctctcctgggtcctgtacaaccttgcgaggcacccagaataccaggagcgctgccgacaggaggtgcaagagcttctgaaggaccgcgatcctaaagagattgaatgggacgacctggcccagctgcccttcctgaccatgtgcgtgaaggagagcctgaggttacatcccccagctcccttcatctcccgatgctgcacccaggacattgttctcccagatggccgagtcatccccaaaggcattacctgcctcatcgatattataggggtccatcacaacccaactgtgtggccggatcctgaggtctacgaccccttccgctttgacccagagaacagcaaggggaggtcacctctggcttttattcctttctccgcagggcccaggaactgcatcgggcaggcgttcgccatggcggagatgaaagtggtcctggcgttgatgctgctgcacttccggttcctgccagaccacactgagccccgcaggaagctggaattgatcatgcgcgccgagggcgggctttggctgcgggtggagcccctgaatgtaggcttgcagtgactttctgacccatccacctgtttttttgcagattgtcatgaataaaacggtgctgtcacctctgcctgggcctcactgacagcctgcag

SEQ ID NO: 207 - DNA, 2360 bp, Homo sapiens
agcagacagagagaggaggttgtctgggacagactgctcctgacagaaggatgtcccagctgagcctgtcctggctgggcctctggccagtggcagcatccccttggctgctcctcctgctggtcggggcctcctggctcctggcccatgtcctggcctggacctacgccttctatgacaactgccgccgccttcggtgtttcccacaacccccaagacggaactggttttggggacaccagggcatggtcaaccccacagaggagggcatgagagttctgactcagctggtggccacctacccccagggctttaaggtctggatgggacccatctcccccctcctcagtttgtgccaccccgacatcatccggtctgtcatcaacgcctcagctgccattgcaccaaaggacaagttcttctacagcttcctggagccctggctgggggatgggctcctgctgagtgctggtgacaagtggagccgccaccgtcggatgctgacgcctgccttccatttcaacatcctgaagccctatatgaagattttcaatgagagtgtgaacatcatgcacgccaagtggcagctcctggcctcagagggtagtgcctgtttggatatgtttgagcacatcagcctcatgaccttggacagtctacagaaatgtgtcttcagctttgacagccattgtcaggagaaacccagtgaatatattgccgccatcttggagctcagtgcccttgtatcaaaaagacaccatgagatcctcctgcatattgacttcctgtattatctcacccctgatgggcagcgtttccgcagggcctgccgcctggtgcacgacttcacagatgccgtcatccaggagcggcgccgcactctccctagccagggtgttgatgacttcctccaagccaaggccaaatccaagactttggacttcattgatgtactcctgctgagcaaggatgaagacgggaagaagttatctgatgaggacataagagcagaagctgacacctttatgtttgagggccatgacaccacggccagtggtctctcctgggtcctgtaccaccttgcaaagcacccagaataccaggagcgctgccggcaggaggtgcaagaacttctgaaggaccgtgagcctaaagagattgaatgggacgacctggcccatttgcccttcctgaccatgtgcatgaaggagagcctgcggctgcatcccccagtcccggtcatctcccgccatgtcacccaggacattgtgctcccagacggccgggtcatccccaaaggcattatctgcctcatcagtgttttcggaacccatcacaacccagctgtgtggccggaccctgaggtctacgacccctttcgctttgacccagagaacatcaaggagaggtcacctctggcttttattcccttctcggcagggcccaggaactgcatcgggcagacgttcgcgatggcggagatgaaggtggtcctggcgctcacgctgctgcgcttccgcgtcctgcctgaccacaccgagccccgcaggaagccggagctggtcctgcgcgcagagggcggactttggctgcgggtggagcccctgagctgagttctgcagagacccactctgaccccactaaaatgacccctgattcatcaaaagtgaagcctagaattaccctaagaccctgttccacagtcctgtattccatcctagatatctactcaaaataattgagacaagtgttcaaacagaaagacgcttgtgcgtgaatgttcatggcggccctattcacagtagccaaacgatgaaaacaaccccaagctatatattaccagatgaaaggataaacaaaatgtggtccatccatacaatggagtattacacagccataaaaaggaatgaagcagtgatccctactacactgtggatgaaccttgaatgcatgatactgaatgaaagacgtcagatgcaaaaggtcacatagtgtactgtccttttatacgaaatttccagaacaggccaatctgaagagatgcatagcggattggtggctttcagcagctgtggggaggtgggactgaggagcgactgctaatcagtatggggtttcctcccgggatggtgaaaatgttccggacctagatactgacgaaggtagcacgacactgtgagtgcactaaatgctattgaattggacactttgaaatggtgaatttcgtggtatgtgaattctacctcaatcaaaaaaatttgctattttatctcacatacattttttttctgtccaggttgttcatataataatatgctgtgagcatctttccatgacattaaatcatcttaggaaacatt

SEQ ID NO: 208 - DNA, 2382 bp, Homo sapiens
caaaagcagttgggccgaacgaagcgtgcgcgctttggtaaccggctagaaatcccgcacgcgcgcctgcctcctctccccaggcctgagctgcccctcccactgcctttccttcttcccgcgagtcagaagcttcgcgagggcccagagaggcggtggggtgggcgaccctacgccagctccgggcgggagaaagcccaccctctcccgcgccccaggaaaccgccggcgttcggcgctgcgcagagccatggaattctcctggctggagacgcgctgggcgcggcccttttacctggcgttcgtgttctgcctggccctggggctgctgcaggccattaagctgtacctgcggaggcagcggctgctgcgggacctgcgccccttcccagcgccccccacccactggttccttgggcaccagaagtttattcaggatgataacatggagaagcttgaggaaattattgaaaaataccctcgtgccttccctttctggattgggccctttcaggcatttttctgtatctatgacccagactatgcaaagacacttctgagcagaacagatcccaagtcccagtacctgcagaaattctcacctccacttcttggaaaaggactagcggctctagacggacccaagtggttccagcatcgtcgcctactaactcctggattccattttaacatcctgaaagcatacattgaggtgatggctcattctgtgaaaatgatgctggataagtgggagaagatttgcagcactcaggacacaagcgtggaggtctatgagcacatcaactcgatgtctctggatataatcatgaaatgcgctttcagcaaggagaccaactgccagacaaacagcacccatgatccttatgcaaaagccatatttgaactcagcaaaatcatatttcaccgcttgtacagtttgttgtatcacagtgacataattttcaaactcagccctcagggctaccgcttccagaagttaagccgagtgttgaatcagtacacagatacaataatccaggaaagaaagaaatccctccaggctggggtaaagcaggataacactccgaagaggaagtaccaggattttctggatattgtcctttctgccaaggatgaaagtggtagcagcttctcagatattgatgtacactctgaagtgagcacattcctgttggcaggacatgacaccttggcagcaagcatctcctggatcctttactgcctggctctgaaccctgagcatcaagagagatgccgggaggaggtcaggggcatcctgggggatgggtcttctatcacttgggaccagctgggtgagatgtcgtacaccacaatgtgcatcaaggagacgtgccgattgattcctgcagtcccgtccatttccagagatctcagcaagccacttaccttcccagatggatgcacattgcctgcagggatcaccgtggttcttagtatttggggtcttcaccacaaccctgctgtctggaaaaacccaaaggtctttgaccccttgaggttctctcaggagaattctgatcagagacacccctatgcctacttaccattctcagctggatcaaggaactgcattgggcaggagtttgccatgattgagttaaaggtaaccattgccttgattctgctccacttcagagtgactccagaccccaccaggcctcttactttccccaaccattttatcctcaagcccaagaatgggatgtatttgcacctgaagaaactctctgaatgttagatctcagggtacaatgattaaacgtactttgtttttcgaagttaaatttacagctaatgatccaagcagatagaaagggatcaatgtatggtgggaggattggaggttggtgggataggggtctctgtgaagagatccaaaatcatttctaggtacacagtgtgtcagctagatctgtttctatataactttgggagattttcagatcttttctgttaaactttcactactattaatgctgtatacaccaatagactttcatatattttctgttgtttttaaaatagttttcagaattatgcaagtaataagtgcatgtatgctcactgtcaaaaattcccaacactagaaaatcatgtagaataaaaattttaaatctcacttcacttagccgacattccatgccctgaccaatcctactgcttttcctaaaaacagaataatttggtgtgcattctttcagactttttcctatacattttatatgtagaaatgtagcaatgtatttgtatagatgtgatcattcctatattgttattgatttttttcacttaataaaaattcaccttattccttaaaaaaaaaaaaaaaaaaaaaaaaaa

SEQ ID NO: 209 - DNA, 2037 bp, Homo sapiens
cgcccccgagcagcgcccgcgccctccgcgccttctccgccgggacctcgagcgaaagacgcccgcccgccgcccagccctcgcctccctgcccaccgggcccaccgcgccgccaccccgaccccgctgcgcacggcctgtccgctgcacaccagcttgttggcgtcttcgtcgccgcgctcgccccgggctactcctgcgcgccacaatgagctcccgcatcgccagggcgctcgccttagtcgtcacccttctccacttgaccaggctggcgctctccacctgccccgctgcctgccactgccccctggaggcgcccaagtgcgcgccgggagtcgggctggtccgggacggctgcggctgctgtaaggtctgcgccaagcagctcaacgaggactgcagcaaaacgcagccctgcgaccacaccaaggggctggaatgcaacttcggcgccagctccaccgctctgaaggggatctgcagagctcagtcagagggcagaccctgtgaatataactccagaatctaccaaaacggggaaagtttccagcccaactgtaaacatcagtgcacatgtattgatggcgccgtgggctgcattcctctgtgtccccaagaactatctctccccaacttgggctgtcccaaccctcggctggtcaaagttaccgggcagtgctgcgaggagtgggtctgtgacgaggatagtatcaaggaccccatggaggaccaggacggcctccttggcaaggagctgggattcgatgcctccgaggtggagttgacgagaaacaatgaattgattgcagttggaaaaggcagctcactgaagcggctccctgtttttggaatggagcctcgcatcctatacaaccctttacaaggccagaaatgtattgttcaaacaacttcatggtcccagtgctcaaagacctgtggaactggtatctccacacgagttaccaatgacaaccctgagtgccgccttgtgaaagaaacccggatttgtgaggtgcggccttgtggacagccagtgtacagcagcctgaaaaagggcaagaaatgcagcaagaccaagaaatcccccgaaccagtcaggtttacttacgctggatgtttgagtgtgaagaaataccggcccaagtactgcggttcctgcgtggacggccgatgctgcacgccccagctgaccaggactgtgaagatgcggttccgctgcgaagatggggagacattttccaagaacgtcatgatgatccagtcctgcaaatgcaactacaactgcccgcatgccaatgaagcagcgtttcccttctacaggctgttcaatgacattcacaaatttagggactaaatgctacctgggtttccagggcacacctagacaaacaagggagaagagtgtcagaatcagaatcatggagaaaatgggcgggggtggtgtgggtgatgggactcattgtagaaaggaagccttgctcattcttgaggagcattaaggtatttcgaaactgccaagggtgctggtgcggatggacactaatgcagccacgattggagaatactttgcttcatagtattggagcacatgttactgcttcattttggagcttgtggagttgatgactttctgttttctgtttgtaaattatttgctaagcatattttctctaggcttttttccttttggggttctacagtcgtaaaagagataataagattagttggacagtttaaagcttttattcgtcctttgacaaaagtaaatgggagggcattccatcccttcctgaagggggacactccatgagtgtctgtgagaggcagctatctgcactctaaactgcaaacagaaatcaggtgttttaagactgaatgttttatttatcaaaatgtagcctttggggagggaggggaaatgtaatactggaataatttgtaaatgattttaattttatattcagtgaaaagattttatttatggaattaaccatttaataaagaaatatttacctaataaaaaaaaaaaaaaaaaaa

SEQ ID NO: 210 - DNA, 1351 bp, Homo sapiens
ccgcttagacaatgccccggagccgccagaccgtcgcgcccctgccccatcgtagtatatgagctcgcctacacaaggacccccgctaaaagccagagctcccagtccccgaggcttgaagacggggactcccttctccaccaactctgtcctcggggggtggggccccagccgagatcacagcgcgacaggagtgggggtggccgctggagacaggtgaagaaacaagaaaactaagaaatccgagcggttggagggggagtctgtgtggatgggatggggacgccgggggaggggctgggccgctgctcccatgccctgatccggggagtcccagagagcctggcgtcgggggaaggtgcgggggctggccttcccgctctggatctggccaaagctcaaagggagcacggggtgctgggaggtaaactgaggcaacgactggggctacagctgctagaactgccacctgaggagtcattgccgctgggaccgctgcttggcgacacggccgtgatccaaggggacacggccctaatcacgcggccctggagccccgctcgtaggccagaggtcgatggagtccgcaaagccctgcaagacctggggctccgaattgtggaaataggagacgagaacgcgacgctggatggcactgacgttctcttcaccggccgggagtttttcgtaggcctctccaaatggaccaatcaccgaggagctgagatcgtggcggacacgttccgggacttcgccgtctccactgtgccagtctcgggtccctcccacctgcgcggtctctgcggcatggggggacctcgcactgttgtggcaggcagcagcgacgctgcccaaaaggctgtccgggcaatggcagtgctgacagatcacccatatgcctccctgaccctcccagatgacgcagctgctgactgcctctttcttcgtcctgggttgcctggtgtgccccctttcctcctgcaccgtggaggtggggatctgcccaacagccaggaggcactgcagaagctctctgatgtcaccctggtacctgtgtcctgctcagaactggagaaggctggcgccgggctcagctccctctgcttggtgctcagcacacgcccccacagctgagggcctggccttggggtactgctggccaggggtaggatagtataggaagtagaaggggaaggagggttagatagagaatgctgaataggcagtagttgggagagagcctcaatattgggggaggggagagtgtagggaaaaggatccactgggtgaatcctccctctcagaaccaataaaatagaattgaccttttaaaaaaaaaaaaaaaaaaaaa

SEQ ID NO: 211 - DNA, 1681 bp, Homo sapiens
cacagccggccgacaccacaccagccggggagccgccgccgccgccgccacctctgagcagccggctgggagcgagagccgacagctagtctgcaagccaccgctgtcgccatggggagccgcgtctcgcgggaagacttcgagtgggtctacaccgaccagccgcacgccgaccggcgccgggagatcctggcaaagtatccagagataaagtccttgatgaaacctgatcccaatttgatatggattataattatgatggttctcacccagttgggtgcattttacatagtaaaagacttggactggaaatgggtcatatttggggcctatgcgtttggcagttgcattaaccactcaatgactctggctattcatgagattgcccacaatgctgcctttggcaactgcaaagcaatgtggaatcgctggtttggaatgtttgctaatcttcctattgggattccatattcaatttcctttaagaggtatcacatggatcatcatcggtaccttggagctgatggcgtcgatgtagatattcctaccgattttgagggctggttcttctgtaccgctttcagaaagtttatatgggttattcttcagcctctcttttatgcctttcgacctctgttcatcaaccccaaaccaattacgtatctggaagttatcaataccgtggcacaggtcacttttgacattttaatttattactttttgggaattaaatccttagtctacatgttggcagcatctttacttggcctgggtttgcacccaatttctggacattttatagctgagcattacatgttcttaaagggtcatgaaacttactcatattatgggcctctgaatttacttaccttcaatgtgggttatcataatgaacatcatgatttccccaacattcctggaaaaagtcttccactggtgaggaaaatagcagctgaatactatgacaacctccctcactacaattcctggataaaagtactgtatgattttgtgatggatgatacaataagtccctactcaagaatgaagaggcaccaaaaaggagagatggtgctggagtaaatatcattagtgccaaagggattcttctccaaaactttagatgataaaattagccgggcgtggcggcacatgcctgtaatcccagctacatgggaggctgaggtgggagaattgcttgaacccaggaggcggaggcagaggctgcagtgacccaagattgtgccactgcactccaccctgggcaacagagcaagaccccatctcaaaaataaataaatatatataaaaaataaaaagctatttctagtttatttcactataaagttttgctttattaaaaagctaataaacagctattaatcacagtgtattagtatttgttacatttttgtatttcactatctttatactatataatatggtaacttgggtaccgggggaactttaaaatttcatctcaaaaataatttttaaaaagcctgaggtatgatatagcataaaagattgagatgaaaatatatttccctgtaagctgaattactcatttaaaaattttaacttctatatgggacccgaattagacactgctgaatcctgtacagccttactcataaataaagtacttactgaatttccaccattcaaaaaaaaaaaaaaa

SEQ ID NO: 212 - DNA, 2058 bp, Homo sapiens
cacagccggccgacaccacaccagccggggagccgccgccgccgccgccacctctgagcagccggctgggagcgagagccgacagctagtctgcaagccaccgctgtcgccatggggagccgcgtctcgcgggaagacttcgagtgggtctacaccgaccagccgcacgccgaccggcgccgggagatcctggcaaagtatccagagataaagtccttgatgaaacctgatcccaatttgatatggattataattatgatggttctcacccagttgggtgcattttacatagtaaaagacttggactggaaatgggtcatatttggggcctatgcgtttggcagttgcattaaccactcaatgactctggctattcatgagattgcccacaatgctgcctttggcaactgcaaagcaatgtggaatcgctggtttggaatgtttgctaatcttcctattgggattccatattcaatttcctttaagaggtatcacatggatcatcatcggtaccttggagctgatggcgtcgatgtagatattcctaccgattttgagggctggttcttctgtaccgctttcagaaagtttatatgggttattcttcagcctctcttttatgcctttcgacctctgttcatcaaccccaaaccaattacgtatctggaagttatcaataccgtggcacaggtcacttttgacattttaatttattactttttgggaattaaatccttagtctacatgttggcagcatctttacttggcctgggtttgcacccaatttctggacattttatagctgagcattacatgttcttaaagggtcatgaaacttactcatattatgggcctctgaatttacttaccttcaatgtgggttatcataatgaacatcatgatttccccaacattcctggaaaaagtcttccactggtgaggaaaatagcagctgaatactatgacaacctccctcactacaattcctggataaaagtactgtatgattttgtgatggatgatacaataagtccctactcaagaatgaagaggcaccaaaaaggagagatggtgctggagtaaatatcattagtgccaaagggattcttctccaaaactttagatgataaaatggaatttttgcattattaaacttgagaccagtgatgctcagaagctcccctggcacaatttcagagtaagagctcggtgataccaagaagtgaatctggcttttaaacagtcagcctgactctgtactgctcagtttcactcacaggaaacttgtgacttgtgtattatcgtcattgaggatgtttcactcatgtctgtcattttataagcatatcatttaaaaagcttctaaaaagctatttcgccaggcacggtggctcatgcctataatcccagcactttgggaggccaaggtgggtggatcacctgaggtcaggagttcgagaccagcctggccaacacggtgaaaccccatctctactaaaaatgcaaaaattagccgggcgtggcggcacatgcctgtaatcccagctacatgggaggctgaggtgggagaattgcttgaacccaggaggcggaggcagaggctgcagtgacccaagattgtgccactgcactccaccctgggcaacagagcaagaccccatctcaaaaataaataaatatatataaaaaataaaaagctatttctagtttatttcactataaagttttgctttattaaaaagctaataaacagctattaatcacagtgtattagtatttgttacatttttgtatttcactatctttatactatataatatggtaacttgggtaccgggggaactttaaaatttcatctcaaaaataatttttaaaaagcctgaggtatgatatagcataaaagattgagatgaaaatatatttccctgtaagctgaattactcatttaaaaattttaacttctatatgggacccgaattagacactgctgaatcctgtacagccttactcataaataaagtacttactgaatttccaccattcaaaaaaaaaaaaaaa

SEQ ID NO: 213 - DNA, 2013 bp, Homo sapiens
aacgcccccgccgagcgggcggatcgagttcctctctggctggtgggctgcaagcggcagagcccgcccgcacagcccagcttttttctttctacccagactctcaacttgaccgcgcgttggtctgtgcgcccgctaacgtgccaggcacgcgccggggagctccgggatatgctccgcggtgctaccggtgacaagtgtggtatctggaatttgtgtagttctttgccccctgtctcaaccacaaaccttgacgacacagtatggccaggggccgagctcctcccttgcccactttgttctccagactgctaggagtcaagagtcagcttgtctccccagactcttcctgggagggatgagaggtttatgtgagttctactggcaggaatttggcataaaaggtttcagtgtagctcagaagccatttggagccacgtatgtatggagcagcatcataaacactcttcaaacacaagtggaagtgaaaaaacgaaggcaccgtttaaaacgacataatgactgctttgttggttcagaagctgtggatgtcattttttctcacctaattcagaataagtattttggtgatgtagatattcctcgagccaaagtggtgagagtgtgtcaagcgcttatggactacaaagtatttgaagcagttccaaccaaagtctttggaaaagacaaaaaacctacatttgaagatagtagttgcagcctttatagattcaccacaatacctaaccaagacagtcagttaggcaaagagaacaaactatattcacctgccaggtatgcagatgcattatttaagtcatccgatatcagatcagccagtttagaggacctgtgggaaaatctgagtttaaagcctgccaactcccctcatgtaaatatctctgcaaccttgtctccacaagttattaatgaagtgtggcaagaagaaacaattgggcgtctactacaacttgtagaccttccacttcttgactccttactgaaacagcaagaggctgtacctaaaattcctcaacctaagaggcagtccaccatggtcaacagcagtaactatctggatcgagggattctcaaggcttatagtgactctcaggaagatgagtggctctcggcagcaattgactgtttagaataccttccagaccaaatggtggtggaaataagcagaagctttcctgagcaaccagaccgaacagacttagtgaaagaacttctgtttgatgccattggcagatattacagtagtagggaacctctgttaaatcacttatctgacgttcataatggaattgcagaactcttagtgaatgggaagacggaaatagctttagaagctacccagctccttctaaagcttttagatttccaaaatagagaagaatttagaagactactgtatttcatggctgttgcagcaaatccttctgagtttaaattacagaaagaaagtgacaaccgaatggttgtgaaaaggatattctcaaaagctattgttgacaataaaaatttatccaaaggcaaaacagatcttctggtactctttttaatggatcatcagaaagatgtttttaagattcctggaactctacataaaattgtaagtgttaagcttatggccatacagaacggaagagatccaaatagagatgcaggatatatttattgccagagaattgatcaacgtgactattccaacaatacagagaagacaaccaaagatgagctgttgaatttactaaaaactcttgatgaggattcaaaactttctgccaaagagaagaaaaaattgctaggtcaattctataagtgtcacccagacatctttattgagcattttggagactgagtttttaatatctgtatataagttgtgtattttaagaataaattatgtatcctaaatatccaatcacatttgtaagcgtggaagctctaaatttgaaactgtacttaataaaaatttttttgtataaaaaaaaaaaaaaaaaaaaa

SEQ ID NO: 214 - DNA, 2521 bp, Homo sapiens
aggagcttagagtggagtttacaggaatgaatcactgattagcggcaggcctaagtgtgggcactgtcgcaccacacacccagatactactccaggcacgggcattaggggctcccacaggctggacaggccttggactttcctggttgaaccgtgaggccgcggtgtcagtccacactccactgtgggtggcgggttcggccccgcgaggaggcgccgctctcaaaccccacggtcccgcgcagcgaagaggcgaggcggccgcggaaggcaggcgcagcccactcttcccgagaggccccgacatctcccggataatctggagctttcaaaatgtttgccaaagcaaccaggaattttcttagagaagttgatgctgatggtgacctgattgcagtatcaaatctgaatgactctgataagttacagcttctaagtctggtgacaaaaaagaagagattctggtgctggcagagacccaagtaccagtttttatccctcacccttggcgatgtactcatagaagaccaatttccgagtccagtggtcgtggagtcggactttgtgaaatacgagggcaagtttgcaaaccacgtgagtggaaccctggagactgcactggggaaggtcaagctgaacctggggggcagcagccgcgtagagagccagtcttcatttggaaccctgaggaagcaggaggtggatttgcagcagctcatcagagactctgccgagagaacaataaatctgagaaaccctgtgctccagcaggtgctggaaggaaggaatgaggtcctgtgcgttttgacacagaagatcacgacgatgcagaagtgtgtgatctctgagcacatgcaggtcgaggagaagtgtggtggcatcgtgggcatccagaccaagacggtgcaggtgtcagcgacggaggatgggaatgtcaccaaggactccaacgtggtgctggagatcccagctgccaccaccattgcctacggtgtcattgagttatacgtgaaactggacggccagttcgagttctgccttctccgagggaagcaaggtggcttcgagaacaagaagagaattgactctgtctacctggaccccctggtctttcgagagtttgcattcatagacatgccagatgctgcgcatgggatatcttcccaggatggaccattaagtgttttaaagcaagcgaccctgctcctggagaggaatttccatccatttgcggagctgcctgagccacaacagacagctttgagtgacatcttccaggcggtcctatttgatgatgaactactcatggtcctggaaccagtgtgcgatgacctggtcagcggcctctcgcccacagtggcggtgctgggggagctgaagccccggcagcagcaggaccttgtggccttcctgcagctggtggggtgcagcttacagggtgggtgtccgggccccgaggatgcaggcagcaagcagctgtttatgacagcctacttcttggtcagtgccctcgcagaaatgccagatagcgcagcagctctgctgggcacttgctgcaaactccagatcattcccacactgtgccacttgcttcgtgctctgtctgatgatggagtatctgatcttgaagacccaaccttgactcccctgaaagatacagaaaggtttgggattgtgcagcgcttgtttgcctcagctgacattagtctggagagactgaagtcatctgtgaaagctgtcattctgaaggactctaaagtcttcccactgcttctttgtataaccctgaatggactctgtgctttaggcagagaacattcatgatgtcatatgtgaactagaagtacgtgttactggccaaggctatttttcagaactgttaaaggtcatatgcacgttaaaagttgaccaatgaaatgaatttacagaacagtttaagaagtggtgacattttgcatgatgaatgacctgacttttagccaccaggtactctttaaacagttttccttatcagaggccctcctgtgctggtgacccagcatctgagttaggttccagcatgtaaagagctgggagggcggagaattcttagcatacattcagacgttttttctgcacaataataagtccatctgtcacttgcattccactttttgttacatagaaagagtctgaccctttaatccaaaaggtctttttacattgtgaatgctgtgggaaggcaatttctctgcacacaagaggctacgttttggaagtgatgtatgttatttgatgactgaaaatgaactgtaaatgctcctagagtatattcctctgctgaacaaaattaaacttcaaaaaaatctaacagtaacacacccctgcttgggaccctagctatatgcattttatgtgaccttgccatgcttcagtgaacatactaattctatgtctagcacatgttgatttcctatgtattctgggtattctattaaaggaaactttgaactatgaaaaaaaaaaaaaaaaaaaaaaaaaa

SEQ ID NO: 215 - DNA, 1218 bp, Homo sapiens
aaaggtctaggatgacatctggtgtattgactgtggccagtcttaaagctagtttttgctatgtggaacatgctgctctaattcagatttaaagagtttcttcctgttaattcgaagctcactgtgcctcttgtttccgagggaagaaggactgattaagtcatctaaatggatgcaatactgaattacaggtcagaagatactgaagattactacacattactgggatgtgatgaactatcttcggttgaacaaatcctggcagaatttaaagtcagagctctggaatgtcacccagacaagcatcctgaaaaccccaaagctgtggagacttttcagaaactgcagaaggcaaaggagattctgaccaatgaagagagtcgagcccgctatgaccactggcgaaggagccagatgtcgatgccattccagcagtgggaagctttgaatgactcagtgaagacgtcaatgcactgggttgtcagaggtaaaaaagacctgatgctggaagaatctgacaagactcataccaccaagatggaaaatgaggaatgtaatgagcaaagagaaagaaagaaagaggagctggcttcaaccgcagagaaaacggagcagaaagaacccaagcccctagagaagtcagtctccccgcaaaattcagattcttcaggttttgcagatgtgaatggttggcaccttcgtttccgctggtccaaggatgctccctcagaactcctgaggaagttcagaaactatgaaatatgaaatatctctgcttcaaaaaatgaggaagagcaagactgtcccctatgctgccaacatgcagtctttgtttatgtcttaaaaatgtcatgtttatgtcatgtctgtgaattgctgagtactaattgattcctccatccttgaatcagttctcataatgctttttaaataagaaaaattcagaagatgaatttcttccaatatttgaataaattaaagctcttagatacagagtagattgtattatatgctttttcctattaatactacttatagaaatccattaaaaagcaatctctgtacagtgtatttaaatatttcattgacatactgtgatctctattagtgatggatgtacaaaaaatgttttcttacccttgacttacaatgaaatgtgaaattacttgtctgaaccccgtggggagaaataaataattttcccaaagttcaaaaaaa

SEQ ID NO: 216 - DNA, 8343 bp, Homo sapiens
agttcagtgaatcagaacaatgactgcgccgccgggtacccgggagcgcgtcggaggactgtgagcagccgccgccgggagagctgcgggcggcgcagtgtcaacgctgggctcgggagcctccagcgcagatcctgcccagcgcccgcagcccgcgcgaagccgctgggctccggcactgcagcgctgctcggggactgtgcattgttgtgagccggagaaggggcgcggggattacaaagcctgaagaccccggagcccctttagccatgtggatacctacggagcacgagaaatacggcgtggttattgccagtttccgaggaaccgttccatatggcctgtcattggaaattggagatacagttcagatcctggagaagtgtgatggctggtacagaggatttgccttaaaaaacccaaatatcaagggtatatttccttccagctacgttcacttgaaaaatgcctgtgtaaagaacaaaggacaatttgaaatggttattcccactgaagactctgttatcacagaaatgacatcaacattaagagactggggaaccatgtggaaacaactctatgtgcgtaatgaaggcgatctcttccaccggctgtggcacatcatgaatgaaatcctggacctgaggcggcaggtgctggtgggccacctcacccacgaccggatgaaggacgtgaagcgccacattactgcccggcttgactggggcaatgaacaactgggactggacctggtgcctaggaaagagtacgcaatggtggatccggaagacatcagcattactgagctctaccgattgatggaacatcgacatcggaagaaagacaccccggtgcaggccagcagtcaccacctctttgtccagatgaagagcctcatgtgttccaacctgggagaggagctggaggtcatcttctcactctttgacagtaaagagaaccggccaatcagtgagagatttttcttgaggctgaatagaaacgggcttcccaaagcccctgataaaccggaacgacattgctccctctttgtggatttgggcagcagtgagctaagaaaggacatttatatcaccgtgcacattatccgaatcggtcgaatgggagcaggagaaaaaaagaatgcctgtagtgtccagtaccgacgaccctttggctgtgcagttcttagcatcgctgacctgctaacaggagagacaaaggatgacctcattctgaaagtatacatgtgtaacacagagagtgagtggtaccaaatccatgagaacatcatcaaaaagctgaatgcacgttataacttgactggctccaatgcaggtttagcagtttccttacagctattgcacggagacattgaacaaatcagaagggaatattcatcagtattttctcatggagtatccataacaaggaagctgggattttcaaatattattatgcctggtgaaatgaggaatgatttatatatcactattgaaaggggagaatttgagaaaggagggaagagcgtggccagaaatgtggaagttacgatgttcattgtagacagtagtggccaaaccctgaaggattttatctccttcggctctggggagccaccagccagtgagtaccactcctttgtgctttaccataacaacagtcccaggtggtctgaactgctgaaacttcccattcctgtggataaattccggggtgcacacatccgcttcgagtttcggcattgttccacaaaggagaaaggagagaagaagttgtttgggttttcttttgtccctctgatgcaagaagatggtaggactcttccagatggcactcatgagctcatcgtgcataagtgtgaagaaaacacaaatcttcaggatactacccgctacctcaaacttcccttttccaagggcattttccttgggaataataatcaagccatgaaggccacaaaggagtccttttgtattacatcttttctctgttccacaaaactcacacaaaatggtgatatgcttgatcttttgaaatggagaacccacccagacaagatcactggctgtctctctaaattaaaagaaattgatggctcagagatagtaaagtttctgcaggatacactggataccttatttggaattttagatgaaaattcccaaaaatatgggtctaaagtgtttgattctttggttcacataataaatttgctgcaagatagcaaatttcatcattttaaacctgtaatggacacttacattgagagtcattttgctggggcacttgcatacagagatctcatcaaagtgctcaaatggtacgtggaccggatcacagaagcagagcggcaagagcatatccaggaggtgctgaaggcacaagaatacatttttaagtatatagttcaatctcgaaggctgttttcccttgccactggtgggcaaaacgaagaggagttccgctgctgcattcaggagcttctcatgtcagtccgtttctttctttcgcaagagagcaaagggtctggagcattatctcagtcacaggctgtgtttctgagctctttccctgccgtgtactcagaactgttgaagctctttgatgtccgggaagtagccaacttggtccaggacaccctgggcagtctgccgaccatcctgcatgtggatgattccctgcaggccatcaaactgcagtgcattggcaaaaccgtggaaagccagctttataccaacccagattcccgatacattcttctgcctgtcgtgttacatcacctccacattcacttgcaagaacagaaggacctgatcatgtgtgcacgtatccttagcaacgtattttgtcttatcaagaaaaatagctcagaaaaatctgtgctggaggaaatagatgtgatagtggccagcttgctggatattctgctgaggaccatattggagatcaccagccgacctcagccatccagctcagcaatgcggttccagttccaggatgtcactggggagtttgttgcttgtctcctgtccctattacgacaaatgacagatagacattatcaacagcttcttgatagttttaatacaaaggaagaactaagggatttcctgctgcagatatttactgtgttccgaatattgatacgcccggagatgtttccaaaggactggactgttatgcgcttggttgctaacaatgttattattacaacagttctatacctctcagatgcacttcgtaagaacttcttaaatgaaaactttgattataagatctgggattcctacttttacctcgcagtcatttttataaaccagttgtgtctgcagttggagatgttcacaccttccaagaagaaaaaggtgttagaaaagtatggtgacatgcgggtaacaatgggttgtgaaattttcagcatgtggcaaaacctaggagagcacaagcttcattttatccctgccctgattggccccttcctagaagtgaccttgataccccagccagatcttcggaatgtcatgattccaatttttcatgatatgatggactgggagcagaggcggagtggcaactttaaacaggtggaagccaagctaattgacaaactggatagcctgatgtcagaaggcaaaggtgacgaaacataccgcgagctcttcaacagtattctactaaagaaaattgagcgggaaacatggcgggaaagtggcgtttcattaattgctactgtaactcgtctaatggagaggttgttagattacagggactgcatgaaaatgggagaggtagatggcaaaaagattggctgcacagttagccttctgaacttctataagactgaactgaacaaggaggagatgtatatacgctacattcacaaactctatgatctgcatctcaaagcacagaactttacagaagctgcatataccctcctcttatatgacgagctactggaatggtctgatcggcccctcagggagttcctgacctaccccatgcaaacagaatggcagcgcaaagagcacctgcacctcaccatcatccagaactttgacagaggcaaatgttgggagaatggcattatcttgtgccggaagattgcagagcagtatgagagttattatgactacagaaacctgagcaagatgcggatgatggaagcctctttgtatgacaaaattatggaccagcaacgtcttgaaccagagttcttcagagttggattttatggaaaaaaatttccatttttcttaagaaataaggagtttgtgtgtcgagggcatgactacgagaggctggaagccttccaacagagaatgctgaacgagttcccccatgccatcgccatgcagcacgccaaccagcccgatgagaccatcttccaggcagaagctcagtatttgcagatatatgctgtgactcccattccagagagccaggaggtcctgcagagagagggtgttccggacaacatcaaaagcttctataaagtgaatcacatctggaaattccgctatgaccgaccatttcacaaaggcacaaaagataaagagaatgaattcaagagtctctgggtggagagaacgtcattatacttggtgcagagtttgcctggcatctctcgctggtttgaagtggaaaagcgtgaagtggtagaaatgagtcctctggaaaatgcaattgaagtgctagaaaataagaatcagcagctgaagactctgattagtcagtgtcagacaagacagatgcagaatattaatcccctgactatgtgcctgaatggagttatagatgctgcagttaatggtggcgtttccaggtatcaagaggcattctttgtcaaagaatatatcttaagtcaccctgaagatggggagaaaattgcacgattaagagagctgatgcttgagcaggcacagattctggaatttggtttggccgtgcatgagaagtttgtacctcaagatatgagaccccttcacaaaaagctggttgaccaattctttgtgatgaagtcgagcttagggatacaggagttctctgcttgtatgcaagccagtcctgtccattttcctaatggaagccctcgtgtgtgtagaaactcagcacctgcttctgtgagcccagatggtaccagggtaattcctagacgcagcccgttaagttacccagctgtcaaccgatattcttcctcctcactgtcctcacaagcttctgctgaagtaagcaatattacagggcaatcagaaagctctgatgaagtctttaacatgcagccaagtccatctacctcaagcttgagttctactcactcggcttcacctaatgtgacaagttctgctccatcgagtgccagagcttctcctttgttgtctgacaaacacaaacattcccgagaaaactcttgcctgtcaccaagagagagaccatgcagtgccatctatccaacacctgtggagccttcgcagaggatgctgtttaatcatattggagacggggccttgccacgcagtgacccaaatctctctgcacctgaaaaagctgtgaaccccacccctagcagctggagcctggacagtgggaaggaagccaagaacatgtcggatagtgggaaacttatctctccccctgtccctccaagacccacacagactgcttcaccagcaagacacacgacatcagtatccccctcgcctgccgggcgatctccattgaagggctctgtgcagtctttcaccccctctccagtggagtaccactcgccaggactcatctccaactcccctgtcttgtcgggcagctacagcagtgggatttcttctctcagccggtgcagcacgtcggaaacctcaggctttgaaaatcaggtgaatgaacagtcggcccccctgccggtgccagtgccggtgcccgtgccgagctacggcggggaggagccagtgcgcaaggagagcaagactccgcccccgtacagcgtctacgagcggactctgcggcgccccgtcccgctacctcacagcctctccatccccgtcacgtcggagccgcccgcgctgccccccaagcctctggcagcgcgatccagccacctggagaatggggcccggaggactgaccccggcccgcggcccaggcccctgccccgcaaggtctctcagttataagtcacttttctatgtacctgcgatgcattctttgcccgtttacaaaataagaagtatgatgagaagacatttagtgtaggcactttaataacttactcagctccttcgatgaatggaattaaaacttgcttattaaatatcatgttgcacaatattaaaagttgctgatctaaaacgccagatgttaaatgaagtatggctgaatttcattaaaacgtttctcatttggaagtggtaaatagtgataaagactccttttgtacctttttatgttcacttttttttatatagtttaatcttaaaaccaatacgatattgtcaaacgatacaatgtgtgacaatgttgtatcgtttttactgaatacttgatacttggagaaagcttattaagtcagtgcacatcctaacacagtggtccttattttagaagacttctgtaaataaggcaaggtttatcagtgcagatcatcagaattaaagttcaagcaggcgagcaagacagtatacttaaggggttgcaaagcttgggactggaaattgttttgttcttgaaacaaaatacttctttaaggttgcttttgctgtttgactgctgtctacattcgtaaaattctattttgtgaattggtagctaaatcccttactaccctgacaccgtggtatctactgtatttcttttcaaggtgcaatttgcttcagagttccaatcagctagattaagcaagaggctccagaagaaatgtttacttgaattttgcgcttcctttcttgatagtttcctatataaaatttgtcattgaacaagagcaaatgctgaagtattaatgaggcacaaatgactgtgccccattagcaagaattcaggaatcaatacagacagtattaaattaatagcttaagtgaagaaaaaaaaaacttagtgaaaatgtattagcacgattaaatggcaaaaggacttataaaaggcaagggcattaactttcagtcctgcacaaaataaaaaattcctcacgactctccacttttaccagtggagtttgtcttagctgacctgtcgtctttctcttgaaggaggattgctgtagacttctctagcttgaatattgcaacatagcatcttaggtctagatagggatgctaatgccagttgtagaagtgtgaaaaaagcaccttgtatgtagtaatgtattttatatctttgttttttcttttactgactgtttataacactcaattgacaatagatatgaactgtattttaaatcatactgttaaatattttccctcttttgttgggaagctcattttagtttaaccatgtttgttttgttggtagcttacctggaaggcagtgaccacttttttatattctcttaatgaaaccattcagcaggtatatgctgttgaggctggttatagaggttttctataataaatgttcaagtatttttgtatataactggttaattttaataagagataccattatgtgtaaaaaaaagtaaaaataaacgcaaacagttgttgatgcagtatgattgttataattatgccaaatactttacgtatggaaaaagaatatttgtacatatgtgcttttaacaattctgccatattgactttacaattttgaatgtcggaaaaattaatatatgttaaatatttatgtttagtgaaagtgttcataattgagaaaaggaacatatgcattttagctttgtatcttgcaagttttgcagtcagaaattttttgaactagcttttgcttttgataacacttcgtgtttgtaaccacattcatatatatatacatatatatgtgaagctccatatttctgttgctttaaagaagtaaaaccttccatttaaataagatgacatgcataagataacaaagcttccttgatttccttttcctgtgtaatttaatagatttgttgactagtgcttgggcacattataaatcagtgttatttgctcttggagccattttttaaaaaaaattttggcagtgagcagttgaatttatcttgaatttatcatgtgtgtgtatttctgaagcagctacatagcagaacattttaagagattctgttagcccacatgttcatgttggttgctgctgaatggtaaatattaaataaaattaccagattaatcttaataaaaaaaa

SEQ ID NO: 217 - DNA, 2559 bp, Homo sapiens
gactacgtgggtctggagctgactgccgtcctgacacgtcctagagctgcaagtcctgccagagagccaccatgacctctcagcctctcaggctagcagaagagtatggcccaagtcctggggagtctgaactggctgtgaacccctttgatgggcttcccttctcttcccgctactatgagctgctgaagcagcgccaagccttgcccatctgggctgctcgctttaccttcttggagcagttggagagtaaccccactggagtggtgctggtgtctggggagcctggttctggcaagagcacccagatccctcagtggtgtgcagagtttgcgctggccagagggttccagaaaggacaggttactgttactcagccctaccctcttgcagcccgggagcctggctctgcgggttgctgatgagatggacctgaccctgggtcatgaggttggatccagcatcccccaggaggactgcacggggcccaacaccctgctcaggttctgctgggacaggctgcttctgcaggaggtggcctcgacccgaggcactggagcctggggcgtgctggtactagatgaggctcaggagcggtcggtggcatcagattcactccaggggctactgcaagatgccaggctggaaaaacttccgggggacctcagagtggttgtggttactgacccagcccttgaacctaagctccgagctttctggggcaatcctcctattgtgcatatacccagagagcctggtgagagaccttcccccatctactgggacaccatcccacctgatcgggtggaagctgcctgccaagcagtgcttgaattgtgtcggaaggagcttccaggagatgtgctagtgttcctgcccagtgaggaggaaatttccctgtgctgtgaatccttgtccagggaggtagagtccttgcttctccaagggcttccaccacgagtactgccccttcacccagactgtggacgagccgttcaggctgtgtatgaggacatggatgcccgaaaggttgtggtcactcactggctggctgacttctccttctccctcccttccatccaacatgtcatcgactcaggactggagctccgaagtgtttacaatcctaggatccgagcagaattccaagtgttgaggccaatcagcaagtgtcaggcagaggcaagacgattgcgagcaagagggttcccaccaggatcctgcctctgcctgtatcctaagtccttcttagaactagaagctccaccattgccacaacccagggtgtgtgaggagaatctgagctccctggtgttactactaaaaaggagacagattgcagagccaggggagtgtcacttcctggaccagcctgctccagaagcactgatgcaagccctggaagatttagactatctggcagccctggatgatgatggggacctgtcagatctgggtgtcatactatcagaattccctctggcccctgagctggccaaagccctgctggcctcatgcgagtttgactgtgtggacgagatgctcaccctggctgccatgctcacagctgcccctgggtttacccgtcctccactcagtgcagaagaagctgccctgcgtcgggccctggaacacacggatggtgaccacagttctctgatccaggtgtatgaagcctttatacaaagtggagcagatgaggcttggtgccaggctcgaggtctgaattgggcagcattgtgccaagcccataaacttcggggagaactcctagaactcatgcaacgaattgaacttcccttgtccctaccagcctttggctctgagcagaatcgcagagaccttcagaaagcactggtgtcagaatactttctcaaggtggccagagacacagacgggactggaaattaccttctcctaacccataagcatgtggcccagctctcctcatactgctgctaccgaagccgcagagctcctgccagacccccaccatgggtgctctaccacaatttcaccatatccaaagacaactgcctctccattgtttctgagattcaaccacagatgctggtggaattggcccctccatacttcctgagtaacttgcctcccagtgagagcagagaccttctgaaccagctaagggaaggaatggcagattctacagcagggagcaaatcatcctcagcccaggagttcagagatccctgtgtcctgcagtgacctgcctgcctatggaatggagctgggttcatctcatcacattagattatccctcagggtgacaccaaagcacccagacagatttagaagcccaaagtttagggtcaaatgtaaaccctggaacctgagtcccaagaaatggtagactgggaatggaaagaatggggtaaaccacagtctacatagggaaggactctttccttagccttctcttattgattggagagggactgacatgctcctcattctcttaactttgccaaacccattcttgtactcccttgtgatctataaaagatttttctatgatgccaaaaaaaaaaaaaaaaaaaa

SEQ ID NO: 218 - DNA, 6428 bp, Homo sapiens
ggtctgtcctgagccgacacctgcacagtggcgagaccaaggacccagagagaaaggtgagagtgcagccggggaggctgaggatcggcggagctggaagagtgagggtgaaggcaagaagtagagcacagaagcaaagattttaagaggaaagaagacatctgaacccaacaccaccctaaaccacaggctgcagggttggcatgctccgtgcaagaccagaggcactgatgctcctgggagctcttctgactggatccctgggtccatcgggcaatcaggacgcactctcactgccctgggaagtgcagcgctatgacggctggtttaacaacctgaggcaccacgagcgtggtgctgttggctgccggttgcagcgccgcgtaccagccaattacgccgacggtgtgtatcaggctctggaggagccgcagctgcccaacccgcgccggctcagcaacgcagccacgcggggcatagccggcctgccgtcgctccacaaccgcaccgtactgggggtcttctttggctaccatgttctttccgacgtggtgagcgtggaaacgcccggttgccccgccgagttcctcaacatccgcatcccacctggagaccccgtgttcgaccccgaccagcgcggggacgtggtgctgcccttccagaggagccgctgggaccccgagaccggacggagtcccagcaacccccgggacctggccaaccaggtgacgggctggctggacggcagcgccatctatggctcctcgcactcctggagcgacgcgctgcggagcttctcggggggacagctggcgtcggggcccgaccccgctttcccccgagactcgcagaaccccctgctcatgtgggcggcgcccgaccccgccaccgggcagaacgggccccgggggctgtacgccttcggggcagagagagggaaccgggaacccttcctgcaggcgctgggcctgctctggttccgctaccacaacctgtgggcgcagaggctggcccgccagcacccagactgggaggacgaggagctgttccagcacgcacgcaagagggtcatcgccacctaccagaacatcgctgtgtatgagtggctgcccagcttcctgcagaaaacactcccggagtatacaggataccgtcctttcctagaccccagcatctccccggaatttgtggtggcctctgagcagttcttctctaccatggtgccccctggtgtctacatgagaaatgccagctgtcatttccggaaggtcctgaacaagggttttcaaagctcccaagctctcagggtctgcaacaactactggattcgggagaaccccaatctgaacagtacccaggaggtgaatgagctgctgctgggaatggcctcccagatttcggagttggaggacaacatagtggttgaagatctgagggattactggcctggccctggcaaattctcccgtacagactatgtggccagcagcatccaacgtggccgagatatggggctgcccagctatagccaggccctgctggcctttgggctggacatcccaaggaactggagtgatctcaaccctaatgtggacccccaggtgctggaggccacagctgccctgtacaaccaggacctatcccagctagagctgctccttggggggctcctggagagccatggggaccctggacccctgttcagtgccattgtcctcgaccagtttgtacggctgcgggatggtgaccgctactggtttgagaacaccaggaatgggctgttctccaagaaggagattgaagacatccgaaataccaccctgcgggacgtgctggtcgctgttatcaacattgaccccagtgccctgcagcccaatgtctttgtctggcataaaggtgcaccctgccctcaacctaagcagctcacaactgacggcctgccccagtgtgcacccctgactgtgcttgacttctttgaaggcagcagccctggttttgccatcaccatcattgctctctgctgccttcccttagtgagtctgcttctctctggagtggtggcctatttccggggccgagaacacaagaagctacaaaagaaactcaaagagagcgtgaagaaggaagcagccaaagatggagtgccagcgatggagtggccaggccccaaggagaggagcagtcccatcatcatccagctgctgtcagacaggtgtctgcaggtcctgaacaggcatctcactgtgctccgtgtggtccagctgcagcctctgcagcaggtcaacctcatcctgtccaacaaccgaggatgccgcaccctgctgctcaagatccctaaggagtatgacctggtgctgctgtttagttctgaagaggaacggggcgcctttgtgcagcagctatgggacttctgcgtgcgctgggctctgggcctccatgtggctgagatgagcgagaaggagctatttaggaaggctgtgacaaagcagcagcgggaacgcatcctggagatcttcttcagacacctttttgctcaggtgctggacatcaaccaggccgacgcagggaccctgcccctggactcctcccagaaggtgcgggaggccctgacctgcgagctgagcagggccgagtttgccgagtccctgggcctcaagccccaggacatgtttgtggagtccatgttctctctggctgacaaggatggcaatggctacctgtccttccgagagttcctggacatcctggtggtcttcatgaaaggctccccagaggataagtcccgtctaatgtttaccatgtatgacctggatgagaatggcttcctctccaaggacgaattcttcaccatgatgcgatccttcatcgagatctccaacaactgcctgtccaaggcccagctggccgaggtggtggagtctatgttccgggagtcgggattccaggacaaggaggagctgacatgggaggattttcacttcatgctgcgggaccatgacagcgagctccgcttcacgcagctctgtgtcaaaggtggaggtggaggtggaaatggtattagagatatctttaaacaaaacatcagctgtcgagtctcgttcatcactcggacacctggggagcgctcccacccccagggactggggccccctgccccagaagccccagagctgggaggccctggactgaagaagaggtttggcaaaaaggcagcagtgcccactccccggctgtacacagaggcgctgcaagagaagatgcagcgaggcttcctagcccaaaagctgcagcagtacaagcgcttcgtggagaactaccggaggcacatcgtgtgtgtggcaatcttctcggccatctgtgttggcgtgtttgcagatcgtgcttactactatggctttgcctcgccaccctcggacattgcacagaccaccctcgtgggcatcatcctgtcacgaggcacggcggccagcgtctccttcatgttctcttatatcttgctcaccatgtgccgcaacctcataaccttcctgcgagagactttcctcaaccgctatgtgccttttgatgccgcagtggacttccaccgctggatcgccatggctgctgttgtcctggccattttgcacagtgctggccacgcagtcaatgtctacatcttctcagtcagcccactcagcctgctggcctgcatattccccaacgtctttgtgaatgatgggtccaagcttccccagaagttctattggtggttcttccagaccgtcccaggtatgacaggtgtgcttctgctcctggtcctggccatcatgtatgtcttcgcctcccaccacttccgccgccgcagcttccggggcttctggctgacccaccacctctacatcctgctctatgccctgctcatcatccatggcagctatgctctgatccagctgcccactttccacatctacttcctggtcccggcaatcatctatggaggtgacaagctggtgagcctgagccggaagaaggtggagatcagcgtggtgaaggcggagctgctgccctcaggagtgacctacctgcaattccagaggccccaaggctttgagtacaagtcaggacagtgggtgcggatcgcctgcctggctctggggaccaccgagtaccaccccttcacactgacctccgcgccccatgaggacacactcagcctgcacatccgggcagtggggccctggaccactcgcctcagggagatctactcatccccaaagggcaatggctgtgctggatacccaaagctgtaccttgatggaccgtttggagagggccatcaggagtggcataaatttgaggtgtcagtgttggtgggagggggcattggggtcaccccctttgcctccatcctcaaagacctggtcttcaagtcatccttgggcagccaaatgctgtgtaagaagatctacttcatctgggtgacacggacccagcgtcagtttgagtggctggctgacatcatccaagaggtggaggagaacgaccaccaggacctggtgtctgtgcacatttatgtcacccagctggctgagaagttcgacctcaggaccaccatgctatacatctgcgagcggcacttccagaaagtgctgaaccggagtctgttcacgggcctgcgctccatcacccactttggccgtccccccttcgagcccttcttcaactccctgcaggaggtccacccacaggtgcgcaagatcggggtgttcagctgcggccctccaggaatgaccaagaatgtagagaaggcctgtcagctcgtcaacaggcaggaccgagcccacttcatgcaccactatgagaacttctgagcctgtcctccctggctgctgcttccagtatcctgccttctcttctgtgcacctaagttgcccagccctgctggcaatctctccatcagaatccaccttaggcctcagctggagggctgcagagcccctcccaatattgggagaatattgacccagacaattatacaaatgagaaaaggcaggagactatgttctacaattgcagtgcatgatgattataagtccacctgtttatcaacggcaccattcctgcagccctccagacttcctgcccttagcaagtgcgcaaccagtcaggatctcccaaagaagataaagaccactcctcaccccagctcaagccatggcaggcgtggcaagcaaagtggggaggagacagtccctgcttgtgacaagtgtggaggtgaaaaggtacaatagtgcttgtctccgatagctccccacatctctaattgacttccacaaaatcgatgcgttgctttggtatttgcttggactgacatttgagggaggaggaggctgggatcctctggctgagaatctcctcagagcccagtgcagaagctgtgatgcttagaacctggacagcccgactgcctcaactctgtctccaggtctattccctccagctccaaaaggagcagccctacttctaccccttcccgtccccaaagtgtcagcaactttgaggagggcaccaggaaacaaagatgcctccccagccctgatattcttgatgtcaccagtgatacccactgccctgacccctgggcaggcccctctctgcatctactggagtggtccctgggctctggggctgaaggattccagcctctctgccagatattcagtactcgatctcaattcccctcttccacaagagttgggtgaccagctgtcctagtttgcccaggactctccctgttttagcactgaaagtctcttgccccaggaaaccccatcagtcccaggcagattgggacagctggtcaccttacgcaagagccaggctgaaacatcccctccatactcagctctttaacttttcttttcctttttcatcgggctctttcctaaaaagctgagctgtaaaatattttacatcgaggtataataaataatcatgtacatgttttaccaccacccaggtcaagacatagaatgtttcaacatttccatcaccccagaaactccccttgtacccccttccacttcgtctcccctagctcctagaagcaaccactgatgtgatttctaccaaatccagttttggtcctactaaatatactcttttgagactggcctcttttactcaccataatgcctttgtaattcatccatgctgttgtgtgtatcagcagtttgttccttttcattgctgagtagtattctattgtagagatgtaccacagtttgtttattcttctgttgatggacgtttgggttgtttctaattttgaatgattataaataaaaattctgtgagtgttcttgtaaaaaaaaaaaaaaaaaaaaaaaaaaaaaaaaaaaaaaaaaaaaaaaaaaaaaaaaaaaaaaaaaaaaaaaaaaaaaaaaaaa

SEQ ID NO: 219 - DNA, 1440 bp, Homo sapiens
agcgccaacccgcagaaccaggaaagtaacggctacagacagtgagaaatagtttcgctcgccggctagaaaaactctgtcggtaccaaccccagagcgttgagagcagcccacctccacgcttccttaacggagaggtgcaggactcagacttcaccagcccactcggtcccagccttgtacgcaaagagacgccaaggacgcgctctcccgcgtccaggcagccccagcttgctggcttgcctgcccgcctgcgtgcagcactcggccggcgtgcagcatgaccctgtggaacggcgtactgcctttttacccccagccccggcatgccgcaggcttcagcgttccactgctcatcgttattctagtgtttttggctctagcagcaagcttcctgctcatcttgccggggatccgtggccactcgcgctggttttggttggtgagagttcttctcagtctgttcataggcgcagaaattgtggctgtgcacttcagtgcagaatggttcgtgggtacagtgaacaccaacacatcctacaaagccttcagcgcagcgcgcgttacagcccgtgtccgtctgctcgtgggcctggagggcattaatattacactcacagggaccccagtgcatcagctgaacgagaccattgactacaacgagcagttcacctggcgtctgaaagagaattacgccgcggagtacgcgaacgcactggagaaggggctgccggacccagtgctctacctggcggagaagttcacaccgagtagcccttgcggcctgtaccaccagtaccacctggcgggacactacgcctcggccacgctatgggtggcgttctgcttctggctcctctccaacgtgctgctctccacgccggccccgctctacggaggcctggcactgctgaccaccggagccttcgcgctcttcggggtcttcgccttggcctccatctctagcgtgccgctctgcccgctccgcctaggctcctccgcgctcaccactcagtacggcgccgccttctgggtcacgctggcaaccggcgtcctgtgcctcttcctcggaggggccgtggtgagtctccagtatgttcggcccagcgctcttcgcacccttctggaccaaagcgccaaggactgcagccaggagagagggggctcacctcttatcctcggcgacccactgcacaagcaggccgctctcccagacttaaaatgtatcaccactaacctgtgagggggacccaatctggactccttccccgccttgggacatcgcaggccgggaagcagtgcccgccaggcctgggccaggagagctccaggaagggcactgagcgctgctggcgcgaggcctcggacatccgcaggcaccagggaaagtctcctggggcgatctgtaaataaacctttttttcttttgttttttaaaaa

SEQ ID NO: 220 - DNA, 2498 bp, Homo sapiens
gctgagcgccggaggagcgtaggcagggcagcgctggcgccagtggcgacaggagccgcgcgaccggcaaaaatacacgggaggccgtcgccgaaaagagtccgcggtcctctctcgtaaacacactctcctccaccggcgcctccccctccgctctgcgcgccgcccggctgggcgcccgaggccgctccgactgctatgtgaccgcgaggctgcgggaggaaggggacagggaagaagaggctctcccgcgggagcccttgaggaccaagtttgcggccacttctgcaggcgtcccttcttagctctcgcccgcccctttctgcagcctaggcggcccgggttctcttctcttcctcgcgcgcccagccgcctcggttcccggcgaccatggtgacgatggaggagctgcgggagatggactgcagtgtgctcaaaaggctgatgaaccgggacgagaatggcggcggcgcgggcggcagcggcagccacggcaccctggggctgccgagcggcggcaagtgcctgctgctggactgcagaccgttcctggcgcacagcgcgggctacatcctaggttcggtcaacgtgcgctgtaacaccatcgtgcggcggcgggctaagggctccgtgagcctggagcagatcctgcccgccgaggaggaggtacgcgcccgcttgcgctccggcctctactcggcggtcatcgtctacgacgagcgcagcccgcgcgccgagagcctccgcgaggacagcaccgtgtcgctggtggtgcaggcgctgcgccgcaacgccgagcgcaccgacatctgcctgctcaaaggcggctatgagaggttttcctccgagtacccagaattctgttctaaaaccaaggccctggcagccatcccacccccggttccccccagtgccacagagcccttggacctgggctgcagctcctgtgggaccccactacacgaccaggggggtcctgtggagatccttcccttcctctacctcggcagtgcctaccatgctgcccggagagacatgctggacgccctgggcatcacggctctgttgaatgtctcctcggactgcccaaaccactttgaaggacactatcagtacaagtgcatcccagtggaagataaccacaaggccgacatcagctcctggttcatggaagccatagagtacatcgatgccgtgaaggactgccgtgggcgcgtgctggtgcactgccaggcgggcatctcgcggtcggccaccatctgcctggcctacctgatgatgaagaaacgggtgaggctggaggaggccttcgagttcgttaagcagcgccgcagcatcatctcgcccaacttcagcttcatggggcagctgctgcagttcgagtcccaggtgctggccacgtcctgtgctgcggaggctgctagcccctcgggacccctgcgggagcggggcaagacccccgccacccccacctcgcagttcgtcttcagctttccggtctccgtgggcgtgcactcggcccccagcagcctgccctacctgcacagccccatcaccacctctcccagctgttagagccgccctgggggccccagaaccagagctggctcccagcaagggtaggacgggccgcatgcgggcagaaagttgggactgagcagctgggagcaggcgaccgagctccttccccatcatttctccttggccaacgacgaggccagccagaatggcaataaggactccgaatacataataaaagcaaacagaacactccaacttagagcaataacggctgccgcagcagccagggaagaccttggtttggtttatgtgtcagtttcacttttccgatagaaatttcttacctcatttttttaagcagtaaggcttgaagtgatgaaacccacagatcctagcaaatgtgcccaaccagctttactaaagggggaggaagggagggcaaagggatgagaagacaagtttcccagaagtgcctggttctgtgtacttgtccctttgttgtcgttgttgtagttaaaggaatttcattttttaaaagaaatcttcgaaggtgtggttttcatttctcagtcaccaacagatgaataattatgcttaataataaagtatttattaagactttcttcagagtatgaaagtacaaaaagtctagttacagtggatttagaatatatttatgttgatgtcaaacagctgagcaccgtagcatgcagatgtcaaggcagttaggaagtaaatggtgtcttgtagatatgtgcaaggtagcatgatgagcaacttgagtttgttgccactgagaagcaggcgggttgggtgggaggaggaagaaagggaagaattaggtttgaattgctttttaaaaaaaaaagaaaagaaaaagacagcatctcactatgttgccaaggctcatcttgagaagcaggcgggttgggtgggaggaggaagaaagggaagaattaggtttgaattgctttttt

SEQ ID NO: 221 - DNA, 2498 bp, Homo sapiens; identical to SEQ ID NO: 220

SEQ ID NO: 222 - DNA, 1024 bp, Homo sapiens
gggtgacttggctggcgggatcaagtgcagctgcttcaggctgaggtggcagatagtgagcgctggtggcggagttaaagtcaaagcaggagagtaattatgaatagcgcagcgggattctcacacctagaccgtcgcgagcgggttctcaagttaggggagagtttcgagaagcagccgcgctgcgccttccacactgtgcgctatgacttcaaacctgcttctattgacacttcttctgaaggataccttgaggttggtgaaggtgaacaggtgaccataactctgccaaatatagaaggttcaactccaccagtaactgttttcaaaggttcaaaaaaaccttacttaaaagaatgcattttgattattaaccatgatactggagaatgtcggctagaaaaactcagcagcaacatcactgtaaaaaaaacaagagttgaaggaagcagtaaaattcagtatcgtaaagaacaacagcaacaacaaatgtggaattcagccaggactcccaatcttgtaaaacattctccatctgaagataagatgtccccagcatctccaatagatgatatcgaaagagaactgaaggcagaagctagtctaatggaccagatgagtagttgtgatagttcatcagattccaaaagttcatcatcttcaagtagtgaggatagttctagtgactcagaagatgaagattgcaaatcctctacttctgatacagggaattgtgtctcaggacatcctaccatgacacagtacaggattcctgatatagatgccagtcataatagatttcgagacaacagtggccttctgatgaatactttaagaaatgatttgcagctgagtgaatcaggaagtgacagtgatgactgaagaaatatttagctataaataaaaatttatacagcatgtataatttattttgtattaacaataaaaattcctaagactgagggaaatatgtcttaacttttgatgataaaagaaattaaatttgattcagaaatttcaaaaa

SEQ ID NO: 223 - DNA, 2117 bp, Homo sapiens
ggagctgtttacccccactctaataggggttcaatataaaaagccggcagagagctgtccaagtcagacgcgcctctgcatctgcgccaggcgaacgggtcctgcgcctcctgcagtcccagctctccaccgccgcgtgcgcctgcagacgctccgctcgctgccttctctcctggcaggcgctgccttttctccccgttaaaagggcacttgggctgaaggatcgctttgagatctgaggaacccgcagcgctttgagggacctgaagctgtttttcttcgttttcctttgggttcagtttgaacgggaggtttttgatccctttttttcagaatggattatttgctcatgattttctctctgctgtttgtggcttgccaaggagctccagaaacagcagtcttaggcgctgagctcagcgcggtgggtgagaacggcggggagaaacccactcccagtccaccctggcggctccgccggtccaagcgctgctcctgctcgtccctgatggataaagagtgtgtctacttctgccacctggacatcatttgggtcaacactcccgagcacgttgttccgtatggacttggaagccctaggtccaagagagccttggagaatttacttcccacaaaggcaacagaccgtgagaatagatgccaatgtgctagccaaaaagacaagaagtgctggaatttttgccaagcaggaaaagaactcagggctgaagacattatggagaaagactggaataatcataagaaaggaaaagactgttccaagcttgggaaaaagtgtatttatcagcagttagtgagaggaagaaaaatcagaagaagttcagaggaacacctaagacaaaccaggtcggagaccatgagaaacagcgtcaaatcatcttttcatgatcccaagctgaaaggcaagccctccagagagcgttatgtgacccacaaccgagcacattggtgacagaccttcggggcctgtctgaagccatagcctccacggagagccctgtggccgactctgcactctccaccctggctgggatcagagcaggagcatcctctgctggttcctgactggcaaaggaccagcgtcctcgttcaaaacattccaagaaaggttaaggagttcccccaaccatcttcactggcttccatcagtggtaactgctttggtctcttctttcatctggggatgacaatggacctctcagcagaaacacacagtcacattcgaattcgggtggcatcctccggagagagagagaggaaggagattccacacaggggtggagtttctgacgaaggtcctaagggagtgtttgtgtctgactcaggcgcctggcacatttcagggagaaactccaaagtccacacaaagattttctaaggaatgcacaaattgaaaacacactcaaaagacaaacatgcaagtaaagaaaaaaaaaagaaagacttttgtttaaatttgtaaaatgcaaaactgaatgaaactgttactaccataaatcaggatatgtttcatgaatatgagtctacctcacctatattgcactctggcagaagtatttcccacatttaattattgcctccccaaactcttcccacccctgctgccccttcctccatcccccatactaaatcctagcctcgtagaagtctggtctaatgtgtcagcagtagatataatattttcatggtaatctactagctctgatccataagaaaaaaaagatcattaaatcaggagattccctgtccttgatttttggagacacaatggtatagggttgtttatgaaatatattgaaaagtaagtgtttgttacgctttaaagcagtaaaattattttcctttatataaccggctaatgaaagaggttggattgaattttgatgtacttatttttttatagatatttatattcaaacaatttattccttatatttaccatgttaaatatctgtttgggcaggccatattggtctatgtatttttaaaatatgtatttctaaatgaaattgagaacatgctttgttttgcctgtcaaggtaatgactttagaaaataaatatttttttccttactgtaaaaaaaaaaaaaaaaaa

SEQ ID NO: 224 - DNA, 2984 bp, Homo sapiens
taactgagcgaggagcaattgattaatagctcggcgaggggactcactgactgttataataacactacaccagcaactcctggcttcccagcagccggaacacagacaggagagagtcagtggcaaatagacatttttcttatttcttaaaaaacagcaacttgtttgctacttttatttctgttgatttttttttcttggtgtgtgtggtggttgtttttaagtgtggagggcaaaaggagataccatcccaggctcagtccaacccctctccaaaacggcttttctgacactccaggtagcgagggagttgggtctccaggttgtgcgaggagcaaatgatgaccgccaaggccgtagacaaaatcccagtaactctcagtggttttgtgcaccagctgtctgacaacatctacccggtggaggacctcgccgccacgtcggtgaccatctttcccaatgccgaactgggaggcccctttgaccagatgaacggagtggccggagatggcatgatcaacattgacatgactggagagaagaggtcgttggatctcccatatcccagcagctttgctcccgtctctgcacctagaaaccagaccttcacttacatgggcaagttctccattgaccctcagtaccctggtgccagctgctacccagaaggcataatcaatattgtgagtgcaggcatcttgcaaggggtcacttccccagcttcaaccacagcctcatccagcgtcacctctgcctcccccaacccactggccacaggacccctgggtgtgtgcaccatgtcccagacccagcctgacctggaccacctgtactctccgccaccgcctcctcctccttattctggctgtgcaggagacctctaccaggacccttctgcgttcctgtcagcagccaccacctccacctcttcctctctggcctacccaccacctccttcctatccatcccccaagccagccacggacccaggtctcttcccaatgatcccagactatcctggattctttccatctcagtgccagagagacctacatggtacagctggcccagaccgtaagccctttccctgcccactggacaccctgcgggtgccccctccactcactccactctctacaatccgtaactttaccctggggggccccagtgctggggtgaccggaccaggggccagtggaggcagcgagggaccccggctgcctggtagcagctcagcagcagcagcagccgccgccgccgccgcctataacccacaccacctgccactgcggcccattctgaggcctcgcaagtaccccaacagacccagcaagacgccggtgcacgagaggccctacccgtgcccagcagaaggctgcgaccggcggttctcccgctctgacgagctgacacggcacatccgaatccacactgggcataagcccttccagtgtcggatctgcatgcgcaacttcagccgcagtgaccacctcaccacccatatccgcacccacaccggtgagaagcccttcgcctgtgactactgtggccgaaagtttgcccggagtgatgagaggaagcgccacaccaagatccacctgagacagaaagagcggaaaagcagtgccccctctgcatcggtgccagccccctctacagcctcctgctctgggggcgtgcagcctgggggtaccctgtgcagcagtaacagcagcagtcttggcggagggccgctcgccccttgctcctctcggacccggacaccttgagatgagactcaggctgatacaccagctcccaaaggtcccggaggccctttgtccactggagctgcacaacaaacactaccaccctttcctgtccctctctccctttgttgggcaaagggctttggtggagctagcactgccccctttccacctagaagcaggttcttcctaaaacttagcccattctagtctctcttaggtgagttgactatcaacccaaggcaaaggggaggctcagaaggaggtggtgtggggatcccctggccaagagggctgaggtctgaccctgctttaaagggttgtttgactaggttttgctaccccacttccccttattttgacccatcacaggtttttgaccctggatgtcagagttgatctaagacgttttctacaataggttgggagatgctgatcccttcaagtggggacagcaaaaagacaagcaaaactgatgtgcactttatggcttgggactgatttgggggacattgtacagtgagtgaagtatagcctttatgccacactctgtggccctaaaatggtgaatcagagcatatctagttgtctcaacccttgaagcaatatgtattatatactcagagaacagaagtgcaatgtgatgggaggaacgtagcaatatctgctccttttcgagttgtttgagaaatgtaggctattttttcagtgtatatccactcagattttgtgtatttttgatgtacccacactgttctctaaattctgaatctttgggaaaaaatgtaaagcatttatgatctcagaggttaacttatttaagggggatgtacatattctctgaaactaggatgcatgcaattgtgttggaagtgtccttggtcgccttgtgtgatgtagacaaatgttacaaggctgcatgtaaatgggttgccttattatggagaaaaaaatcactccctgagtttagtatggctgtatatttatgcctattaatatttggaattttttttagaaagtatatttttgtatgctttgttttgtgacttaaaagtgttacctttgtagtcaaatttcagataagaatgtacataatgttaccggagctgatttgtttggtcattagctcttaatagttgtgaaaaaataaatctattctaacgcaaaaccactaactgaagttcagatataatggatggtttgtgactatagtgtaaataaatacttttcaacaat

SEQ ID NO: 225 - DNA, 5532 bp, Homo sapiens
ggcccaccgccgcccaggcaaggccgccctgccttgggcgcagcgctgccatggctgggggccgtggggcccccgggcgcggccgggacgagcctccggagagctacccgcaacgacaggaccacgagctacaggccctggaggccatctacggcgcggacttccaagacctgcggccggacgcttgcggaccggtcaaagagccccctgaaatcaatttagttttgtaccctcaaggcctaactggtgaagaagtatatgtaaaagtggatttgagggttaaatgcccacctacctatccagatgtagttcctgaaatagagttaaaaaatgccaaaggtctatcaaatgaaagtgtcaatttgttaaaatctcgcctagaagaactggccaagaaacactgtggggaggtgatgatctttgaactggcttaccacgtgcagtcatttctcagcgagcataacaagccccctcccaagtcttttcatgaagaaatgctggaaaggcgggctcaggaggagcagcagaggctgttggaggccaagcggaaagaagagcaggagcaacgtgaaatcctgcatgagattcagagaaggaaagaagagataaaagaagagaaaaaaaggaaagaaatggctaagcaggaacgtttggaaattgctagtttgtcaaaccaagatcatacctctaagaaggacccaggaggacacagaacggctgccattctacatggaggctctcctgactttgtaggaaatggtaaacatcgggcaaactcctcaggaaggtctaggcgagaacgtcagtattctgtatgtaatagtgaagattctcctggctcttgtgaaattctgtatttcaatatggggagtcctgatcagctcatggtgcacaaagggaaatgtattggcagtgatgaacaacttggaaaattagtctacaatgctttggaaacagccactggtggctttgtcttgttgtatgagtgggtccttcagtggcagaaaaaaatgggtccattccttaccagtcaagaaaaagagaagattgataagtgcaaaaagcagattcaaggaacagaaacagaattcaactcactggtaaaattgagccatccaaatgtagtacgctaccttgcaatgaatctcaaagagcaagacgactccatcgtggtggacattttagtggagcacattagtggggtctctcttgctgcacacctgagccactcaggccccatccctgtgcatcagcttcgcaggtacacagctcagctcctgtcaggccttgattatctgcacagcaattctgtggtgcataaggtcctgagtgcatctaatgtcttggtggatgcagaaggcaccgtcaagattacggactatagcatttctaagcgcctcgcagacatttgcaaggaggatgtgtttgagcaaacccgagttcgttttagtgacaatgctctgccttataaaacggggaagaaaggagatgtttggcgtcttggccttctgctgctgtccctcagccaaggacaggaatgtggagagtaccctgtgaccatccctagtgacttaccagctgactttcaagattttctaaagaaatgtgtgtgcttggatgacaaggaaagatggagtccccagcagttgttgaaacacagctttataaatccccagccaaaaatgcctctagtggaacaaagtcctgaagattctgaaggacaagattatgttgagactgttattcctagcaaccggctacccagtgctgccttctttagtgagacacagagacagttttcccgatacttcattgagtttgaagaattacaacttcttggtaaaggagcttttggagctgtcatcaaggtgcagaacaagttggacggctgctgctacgcagtgaagcgcatccccatcaacccggccagccggcagttccgcaggatcaagggcgaagtgacactgctgtcacggctgcaccatgagaacattgtgcgctactacaacgcctggatcgagcggcacgagcggccggcgggaccggggacgccgcccccggactccgggcccctggccaaggatgaccgagctgcacgcgggcagccggcgagcgacacagacggcctggacagcgtagaggccgccgcgccgccacccatcctcagcagctcggtggagtggagcacttcgggcgagcgctcggccagtgcccgtttccccgccaccggcccgggctccagcgatgacgaggacgacgacgaggacgagcacggtggcgtcttctcccagtccttcctgcctgcttcagattctgaaagtgatattatctttgacaatgaagatgagaacagtaaaagtcagaatcaggatgaagattgcaatgaaaagaatggctgccatgaaagtgagccatcagtgacgactgaggctgtgcactacctatacatccagatggagtactgtgagaagagcactttacgagacaccattgaccagggactgtatcgagacaccgtcagactctggaggctttttcgagagattctggatggattagcttatatccatgagaaaggaatgattcaccgggatttgaagcctgtcaacatttttttggattctgatgaccatgtgaaaataggtgattttggtttggcgacagaccatctagccttttctgctgacagcaaacaagacgatcagacaggagacttgattaagtcagacccttcaggtcacttaactgggatggttggcactgctctctatgtaagcccagaggtccaaggaagcaccaaatctgcatacaaccagaaagtggatctcttcagcctgggaattatcttctttgagatgtcctatcaccccatggtcacggcttcagaaaggatctttgttctcaaccaactcagagatcccacttcgcctaagtttccagaagactttgacgatggagagcatgcaaagcagaaatcagtcatctcctggctgttgaaccacgatccagcaaaacggcccacagccacagaactgctcaagagtgagctgctgcccccaccccagatggaggagtcagagctgcatgaagtgctgcaccacacgctgaccaacgtggatgggaaggcctaccgcaccatgatggcccagatcttctcgcagcgcatctcccctgccatcgattacacctatgacagcgacatactgaagggcaacttctcaatccgtacagccaagatgcagcagcatgtgtgtgaaaccatcatccgcatctttaaaagacatggagctgttcagttgtgtactccactactgcttccccgaaacagacaaatatatgagcacaacgaagctgccctattcatggaccacagcgggatgctggtgatgcttccttttgacctgcggatcccttttgcaagatatgtggcaagaaataatatattgaatttaaaacgatactgcatagaacgtgtgttcaggccgcgcaagttagatcgatttcatcccaaagaacttctggagtgtgcatttgatattgtcacttctaccaccaacagctttctgcccactgctgaaattatctacactatctatgaaatcatccaagagtttccagcacttcaggaaagaaattacagtatttatttgaaccataccatgttattgaaagcaatactcttacactgtgggatcccagaagataaactcagtcaagtctacattattctgtatgatgctgtgacagagaagctgacgaggagagaagtggaagctaaattttgtaatctgtctttgtcttctaatagtctgtgtcgactctacaagtttattgaacagaagggagatttgcaagatcttatgccaacaataaattcattaataaaacagaaaacaggtattgcacagttggtgaagtatggcttaaaagacctagaggaggttgttggactgttgaagaaactcggcatcaagttacaggtcttgatcaatttgggcttggtttacaaggtgcagcagcacaatggaatcatcttccagtttgtggctttcatcaaacgaaggcaaagggctgtacctgaaatcctcgcagctggaggcagatatgacctgctgattccccagtttagagggccacaagctctggggccagttcccactgccattggggtcagcatagctatagacaagatatctgctgctgtcctcaacatggaggaatctgttacaataagctcttgtgacctcctggttgtaagtgttggccagatgtctatgtccagggccatcaacctaacccagaaactctggacagcaggcatcacagcagaaatcatgtacgactggtcacagtcccaagaggaattacaagagtactgcagacatcatgaaatcacctatgtggcccttgtctcggataaagaaggaagccatgtcaaggttaagtctttcgagaaggaaaggcagacagagaagcgtgtgctggagactgaacttgtggaccatgtactgcagaaactgaggactaaagtcactgatgaaaggaatggcagagaagcttccgataatcttgcagtgcaaaatctgaaggggtcattttctaatgcttcaggtttgtttgaaatccatggagcaacagtggttcccattgtgagtgtgctagccccggagaagctgtcagccagcactaggaggcgctatgaaactcaggtacaaactcgacttcagacctcccttgccaacttacatcagaaaagcagtgaaattgaaattctggctgtggatctacccaaagaaacaatattacagtttttatcattagagtgggatgctgatgaacaggcatttaacacaactgtgaagcagctgctgtcacgcctgccaaagcaaagatacctcaaattagtctgtgatgaaatttataacatcaaagtagaaaaaaaggtgtctgtgctatttctgtacagctatagagatgactactacagaatcttattttaaccctaaagaactgtcgttaacctcattcaaacagacagaggcttatactggaataatggaatgttgtacattcatcataatttaaaattaaattctaagaagaggctgggtgcagtggctcacacctttaatcccagcactttgggaagccaaggcaggaagactgcttgaaaccaggagtttgagaccagcctgagcaacaaagcaagaccccatctctataaaaactaaaaaaattagttgggcatggtggcacatgcctgtagtcccagctactccagaggctgagatggatcatctgagcctcaggaggttgaggctgcagtgagctgtgactgcgccactgcactccagtctgggacaacagagcaagaccctgtcttaaaaaaaaaaagaaaaaaaaaatttttttctaagaagctgtcctacaaagttgagctttgttagtttttcatgtgtaatatattataaatttatcttttgggatataataaatgctttcatatacctgcaaaaaaaaaaaaaaaaaaaa

SEQ ID NO: 226 - DNA, 6063 bp, Homo sapiens
taagttggcgcgtcacctagacgtcagcctcttacctctcggacgtcccgtcccaggagcaaaactctagtgactttgggcccgcccccgtgagagtggagggcggccgatgagggcggttctgaagggaacaagaccaatgagacgagcccggggcggggcgcggggccggagggtggggcgggtggcggcggtggcagtccgaggtctggctccgcgcagtatatgacagtacgtcagcagcgggatggccctagcagtggcggcggctgcagaagcccaagcagccgcggccgcagtggaggctagagccggagcggcggcggcggcggcaccccggggagtttaagatggcggcgggggggacagggggcctgcgggaggagcagcgctatgggctgtcgtgcggacggctggggcaggacaacatcaccgtactgcatgtgaagctcaccgagacggcgatccgggcgctcgagacttaccagagccacaagaatttaattccttttcgaccttcaatccagttccaaggactccacgggcttgtcaaaattcccaaaaatgatcccctcaatgaagttcataactttaacttttatttgtcaaatgtgggcaaagacaaccctcagggcagctttgactgcatccagcaaacattctccagctctggagcctcccagctcaattgcctgggatttatacaagataaaattacagtgtgtgcaacaaacgactcgtatcagatgacacgagaaagaatgacccaggcagaggaggaatcccgcaaccgaagcacaaaagttatcaaacccggtggaccatatgtagggaaaagagtgcaaattcggaaagcacctcaagctgtttcagatacagttcctgagaggaaaaggtcaacccccatgaaccctgcaaatacaattcgaaagacacatagcagcagcaccatctctcagaggccatacagggacagggtgattcacttactggccctgaaggcctacaagaaaccggagctacttgctagactccagaaagatggtgtcaatcaaaaagacaagaactccctgggagcaattctgcaacaggtagccaatctgaattctaaggacctctcatataccttaaaggattatgtttttaaagagcttcaaagagactggcctggatacagtgaaatagacagacggtcattggagtcagtgctctctagaaaactaaatccgtctcagaatgctgcaggcaccagccgttcagaatctcctgtatgttctagtagagacgctgtatcttctcctcagaaacggcttttggattcagagtttattgatcctttaatgaataaaaaagcccgaatatctcacctgacgaacagagtaccaccaacactaaatggtcatttgaatcccaccagtgaaaaatctgctgcaggcctcccgctgccccctgcggctgctgccatccctacccctccaccgctgccttcaacctatctgcccatctcacatcctcctcagattgtaaattctaactccaactcccctagcactccagaaggccgggggactcaagacctacctgttgacagttttagtcaaaacgatagtatctatgaggaccagcaagacaaatatacctctaggacttctctggaaaccttaccccctggttccgttctactaaagtgtccaaagcctatggaagaaaaccattcaatgtctcacaaaaagtccaaaaagaagtctaaaaaacataaggaaaaggaccaaataaaaaagcacgacattgagactattgaggaaaaggaggaagatcttaagagagaagaggaaattgccaagctaaataactccagtccaaattccagtggaggagttaaagaggattgcactgcctccatggaaccttcagcaattgaactcccagattatttgataaaatatatcgctatcgtctcctatgagcaacgccagaattataaggatgacttcaatgcagagtatgatgagtacagagctttgcatgccaggatggagactgtagctagaagatttatcaaactagatgcacaaagaaagcgcctttctccaggctcaaaagagtatcagaatgttcatgaagaagtcttacaagaatatcagaagataaagcagtctagtcccaattaccatgaagaaaaatacagatgtgaatatcttcataacaagctggctcacatcaaaaggctaataggtgaatttgaccaacagcaagcagagtcatggtcctagaactctgcttggaccagaagatgtgaataaacttaagcttatttatttaaaattccaaatgagttgctctagattctaaaaaggtgaaactttggctgttgaaagtttcagtattagtaaacttgagttactttttcttttccattttactttgcttccctgcatttcgaagctgctctttctggtcctccccaccaccccacccccaagacttgtgtttgttaatagaaataatttttttaggtattggggatccattgtctatatttcaaatcagttttttttcctcaaaaacttgtgtttgttattagaaatgattttttagatattggggatccagtgtccacacttaaaagttgtatgtgtttaaaaaacaacaacagtaatgtgcaaggtgaaatgcttttggataaacgtaagcctattttctgacgtttcttaatgcaaactctttgccttaaatggtagaatatttagaaatttgcacaaaattaaaaaaataaacattgtcttggagggttaaaaaatagaaaggtgtatgtgtatagattcacatacacatatgtatatacaggctgacttgatctagaacattaaatccgccctgcaagttaaccccccattgcaatggttgccttaaggtgtttgctagttgtgtacatagtgtggttaatcattagctacactgcttcccacttgattagagcaatgggaagcatactgtggcctaccagcatctggaagtgtgtgctcgatctgtatgtgtgcagaggtggtgtggatgtgagcgtgcatgaaggaaaaaaagctgctactcctagtaggccaaacgctcaggttaaacaactgacgagtgttactgtagggtgtttttttgtttttttgttttttttcttctatcaaattgctacttttgttgtggaagacaaaagcatttccatttcaacgagtttgtcagctttattaatgttgggcaaaaattgatatgtcatgaaaatgaaacagatctatagttttgggacaaaattataaaatgaaatgtgtaggtaacctatttatatactgctataaagtattttttgaagagagatatgcaaagaagctattacctacataagaggtatatttaaagattttttttttcatcctggtgccaggaatataaaaaagagtggatatatttaaccataacatactgtgattcatcaaacagcacaaactttcatttcatggagtttatctgttgacattgatttaaactgtcacttgttttatcatgtgggaacataagttatgtggtcaaaaatataaggattttgaattaatgttgattcaagttgtattgtcttattgtattgtcttttcaaagtgctgccagttgaaaagggaagcattatgtttacaaatctgttttgaaatgtttgccaaaattttggtagtgtctttaataaagatgtttgtctccagcatccagaaaaataaatgaataactttgttgtgtatcactgtaaaccagaaaaatgttggttatctagaaaacttgagagagcatgtagattaacttttctctttggagttctaaaacattaactggaaagattagataatatactaaatgtatacagaagtatacagactatacaaagactgaaacaagtcccttttgcactacaactctataacattaccgcagaaattttggttctatgtagcatggacctcctaaggaattctgtttcttttagcattgagatccctggtgctctttttttacctcagaattggtacaatcattattaaacgttaatttatttcaaactttttaattgaaaaaaggaaagggaaacttaattggggataaattcaggcatcatattattatgatagagtctcctgagtggttcgtctataggtaatgaactcattggtgttatttcttggacatcttggccttttaatcaaagactgtgtgctgctatttgctatgagcaaggtttctcaaaagcaaaaggtgcttggaccatttggatcacctgagttagaatctctaggtatagggcccaagtatctgcattttcacaggtttcttgtaggtgactttctgcaagctaaagtatgagaaccattggcttggatgtagttctaaacttttaggtctgtaaatcttgaaatcttgaactgaaggtcaactattggcttttttttttttttaatgtccatcatgtcagcaggtgcaaatcacttttcccctttgcatgatctgaggcacctcctcagttgtttcactgccaactcttgtttcagaacctgtttacaaacaagccttccagttggtgaatggttagccattggagctcctaccctgtacatcagcacatcttctggtttacaagttgggtaacaatgaaagctggagatgctaaatggaaatccagcattgcatacccttagacctgatcacataccagtaaaagccttaatttagatgttagttgtatgtgttggacagatccttgcaaaagtgtgtctgtctattagttgtaaatttgaaaattataaatctctgaatctgctactatccaagtttcatcccttttgaagatgaggcatgagcctattaaaatatttataatcatttttcgtcccctactgcaagacttttagattcttacaaatgattactacaggaatagtggccacttaatgtcagttactccggtggaagaatttatctagttttttttcttttcttttttggaaggatggtgtgaaaaatagcaagattagagaatgagttgtatagttttttctatcacatttcatctaaaatgatttgaaggacttttgaagatttttaccaacatccttaaatcaactccaggttggatgaacaactgatttaaaacaaactaagagaacattaactagatgtgggctttttaaaatatataggtattgcatttcctaccttgttatttattccactttgaatactttagagggcttaactttcaactctttaaggtagtaatggatagttttatacttgttctcacaaaattgttatggtcagtttatatcattgctccatgcattgattataaaaattcagtattaattttttctgatcttataagctttataggagttttcttttctcttataaagtgtttcaccttatgtaaaacaaatgcctgcttgcatattggaagatgttgaaattagttttagacaaaagtggtccatcaattcagacactctgcttggatgccttacccttttcattagtgcattctttgcttctgaaacttggcagaaactcgttagccagtccactgcctttctgacaatgtgtggagtcacgtatgcttggtatatgcctttactacttttaaagttctacagtttattacttgcccaagtgttactaaatccttttcttatgtgtactggatggagaaaaaattatagccagcactttgagaggaaagttttcagaaacaatattaactggcactactaactgaaggccacaggagatgctatcaatgttatttgtaatctgaagattgaacaaggctgtgaggctcatttcaaactattttgaggtgttaaaatatatatatgctgtttctcagctgttccactcaaaccgtgttaggactctcaaaggtaaaatgtcacaggggcttttcagttgttacagagctcagcagctgtggttgcccctgttctacaccaatttcagttcaataaaaatgttaactttgcaaaaaaaaaaaaaaaaaaa

SEQ ID NO: 227 - DNA, 2127 bp, Homo sapiens
gggttgcaggttcagctttcacttagagacagcaactccaaattcagggtcgctggggaaactaaggcaggactggggactctgagtgagaggtcagacgctggtcgcggactctttctcccgagaactggggatagctcttccgatagcccaaagcgattcatgcggatcctagaagaaagcgccgaggtccgggcggttggccggggagagcgaagcgccgcccacgcggctgggaaagcttggggtggcgctggcgggaggtggggccgggggcgggttcctggcggagggtggggcagacgtgggttaccgggtgtgccaaccaaaccctgaacagaggaggtggcggtggtggccctcgcctgtggcccccgtgctgcttgcactcgaactcgtcgccatggaggagctccaggagcctctgagaggacagctccggctctgcttcacgcaagctgcccggactagcctcttactgctcaggctcaacgacgctgccctgcgggcgctgcaagagtgtcagcggcaacaggtacggccggtgattgctttccaaggccaccgagggtatctgagactcccaggccctggttggtcctgcctcttctccttcatagtgtcccagtgttgtcaggagggcgctggtggtagcttggaccttgtgtgccaacgcttcctcaggtctgggcctaacagcctccactgcctgggctcactcagggagcgcctcattatttgggcagccatggattctatcccagccccatcatcagttcagggacacaacctgactgaagatgccagacatcctgagagttggcagaacacaggaggctattctgaaggagatgcagtatcacagccacagatggcactagaggaggtgtcagtgtcagatccactggcaagcaaccaaggacagtcactcccaggatcctcaagggagcacatggcacagtgggaagtgagaagccagacccatgttccaaacagagaacctgttcaggcactgccttcctctgccagccggaaacgtctggacaagaaacgttcagtgcctgtagccactgtagaactggaagaaaagaggttcagaactctgcctttagtgccaagccccctacaaggcctgaccaatcaggatttacaagagggagaagattgggagcaagaagatgaggacatggaccccagattagaacacagttcctcagttcaagaagattctgaatccccaagtcctgaagatataccagactacctcctgcaatacagggccatccacagtgcagaacagcaacatgcctatgagcaggactttgagacagattatgctgaataccgcatcctgcatgcccgtgttgggactgcaagccaaaggttcatagagctgggagcagagattaaaagagttcggcgaggaactccagaatacaaggtcctggaagacaagataatccaggaatataaaaagttcaggaagcagtacccaagttacagagaagaaaagcgtcgctgtgagtaccttcaccagaaattgtcccacattaaaggtctcatcctggagtttgaggaaaagaacaggggcagctgaagttatcaagggaatttttgagcctctgcttagtgaaacacaaaggaacaaagcagctataaactaaatagaatgcaactatctgcttttcttatgctgaccactggagtccatggtggcaagtagagagctgctctaggttcttgaggtttggttttcattattaatttttagggtatgggcactgtgcaaagactccatagctgtgcctaggagtctaggaaaagtgacagaggcttggcttttttacctttagttcagccaagtcattttcaagtcctgagaaatgacatcatcttcaggataaaataatgaggacattagacaaaccaaactaagtgaattttagcctggtagcctctctaaggaaacagtaataataacttctgataagagttaaaagaacttgtagcatacctggatataatgggaaagggcctgggtgttacccatgtactgaaaatgaacttttaccaacatggctaaaaaattaaaactgactgcttctgtgtccttaaaaaaaaaaaaaa

SEQ ID NO: 228 - DNA, 4536 bp, Homo sapiens
agctcagtgtgtggtgagcggcggcggcgcggccgggccggggagcgggcgcggcccggcggcctcagcatggaggacggcttctccagctacagcagcctgtacgacacgtcctcgctgctccagttctgcaacgatgacagcgcttctgctgcaagtagcatggaggtgacagaccgcattgcttcactggagcagagagtccagatgcaagaagacgacatccagctgctcaaatcagctctagctgatgtggttcggcggctgaacattactgaggaacagcaggccgtgcttaacaggaaaggacctaccaaagcaagaccactgatgcagaccctgcctttaagaaccacggtcaacaatggcactgtgttaccaaagaaacctactggctctctaccatccccctccggggtcaggaaagaaactgctgtgccagcaaccaaaagattaaacagatctgtgagtcttctcaatgcttgcaaactgaatagatcgacaccaagtaacatcaagaggaccagctcttctgaacgagtgtctcctgggggtcgaagggaaagcaatggggattccagaggaaaccggaatcgcacaggctccaccagcagctcttccagtggcaaaaagaacagtgaaagcaaacccaaggagcctgtattcagtgcagaagaaggctatgtaaaaatgtttcttcgtggacgccctgttaccatgtacatgcccaaagatcaagtggattcttacagcttggaagcaaaagtagaacttccaaccaagagactcaagctggaatgggtctatgggtacaggggtcgagactgccgtaacaacctgtacttgcttccgacgggagagaccgtctacttcatcgcatccgtggtggtgttatacaacgtggaggagcaactgcagaggcattacgctggccacaacgatgacgtgaagtgcctagcagttcatcctgatcggatcacgatagcaacaggacaagttgcgggcacatcgaaggatggaaaacaattgcccccacatgtgcgcatctgggattctgtgacattgaatactctccacgtcattggaataggtttttttgaccgagcagtcacctgtattgcattctcaaaatctaatggaggaaccaatctctgtgctgtggatgactccaacgaccatgtgctctctgtatgggactggcagaaagaagaaaaactagcagatgtgaagtgctctaatgaagctgtgtttgctgcggatttccaccccacggacaccaacatcatagttacttgtggaaaatcacatctctacttttggacactagaaggaagctcccttaataagaagcaaggattattcgagaaacaagaaaagccaaagtttgtcctctgtgtgactttctctgaaaacggtgacaccattactggagattcaagtggcaacatcttagtatggggaaaaggtacaaatcgaataagctatgcagttcagggggcccatgagggtggcatttttgcactttgtatgttaagagatggcacactggtgtcgggaggtgggaaagaccgaaagctcatttcttggagcggaaactatcaaaaacttcgtaaaacggagattccagaacagtttggtccaatacggacagtggccgaggggaaaggcgatgtgatcttgattggcacaactcgaaactttgtcctgcagggcactctgtcaggggacttcacacccattactcagggtcacactgatgagctctggggactggccatccatgcctcaaaatctcagttcttgacctgtgggcatgacaagcatgccactctctgggacgctgtgggtcaccgtcccgtctgggacaaaataatagaggatccagctcagtcttctggttttcatccttcagggtctgtggttgcagtcggaacactcactgggaggtggtttgtgtttgacacagaaacaaaagacttggtcaccgttcacacagatggaaacgaacagctctctgtaatgcgatactcaccagatgggaatttcttagccataggctcacatgacaactgcatctatatatatggcgttagtgacaacgggaggaagtacacgcgagtgggcaagtgctcgggtcattccagcttcattactcacctggactggtctgtaaactcacagttcctcgtgtcaaattccggagactacgaaatcctctactgggttccctctgcctgtaagcaagtcgtaagtgtggaaactacaagagacattgaatgggctacctatacctgcactttgggattccatgtttttggagtgtggccagaaggctcggacggaaccgacatcaatgccgtctgtcgggcccatgagaagaaactcctgtcaacaggcgacgactttggcaaagtgcacctcttctcatacccctgctcgcagttcagggctccaagccacatctacggcgggcacagcagccatgtcaccaatgtcgatttcctctgtgaagacagccacctcatctccacgggcgggaaagacacaagcatcatgcagtggcgcgtcatttagtacccaccgagagctgtggggagcagcatgggcaaggaagacacagactcgcattacccttggtcactgtgatttctgttttgtttaaaaaattcttacaaacctcaggaaaactgtgccctccgccggctaccttagcttagcgtgtcagcgggcgccacagcggatcagcggttccgtgttcacttttgttgtacaatatatgacacagtgcacattgaataccaacaaggttgcaacgtttacattatagccacatcaacagaagtaactggtatattcttagtaacttttctatgaactcttcaaaaatggtcacagaatgccttttaaaacattgtatataatcttcactgtttcaccatctagcttgctaagtcaaatatttatgatgataatgaggtactgaaccacgatggctgttgaggaattggtcctaaaaggacagatcacttcagaagagtgaataactgatttgcacagctgaatcaggagacacaaagatgagactgtgtttggttacattttccaaagtttcattgcattctcccttggggaggctgtgagagagggcttgtatccctcttgtgctaagcagactctactcctaactgacttcaatatttcagcagggtacacaggcgtttccaagtttcagtgacaccgtcctgcctaaccagatgcggtcagcctcttcacacccacctggcttgcatcccccatcccttgttcacacgccctgattcacggtgagacattttgccaccttcttgtgtatattacttggcatgagatgatattgtacttgtataggattctagcaattcataataaatatgtaagactaggctttactgtcttatgcttatggacattgtatatttgtattttatgaccaagtagaccaagtcagaaagatctctctcgagcgtaccataaacctgcagagagaagtctcgaaaggctccaccaggtaccaagggcagctgcttttcctgtcttttgtgcatgggcgacccattacagtatgagataagattgagttctgatgcgttaaacggaggtggcagaaatttgtcaagaaggccttatccatttcgattgtgtgacagattgaaatttattgtttacattggggaatgtatctcaaatttttaaatagaagagtaataaacagactttaaagcaaatattaagatttttactcattcaaggcaagtaaatgaatggaattatctgagctctatggcactggttgtttagagtgactgatgaagtgcaactttcaaaaacatttttgatgacatcaccagcctactgcagaagtgcagggcaccagtaaacaccatgtattattgaagatgaatctgtttgtatgtatccttgtcaaatatattctataatgaaataaaatctgaaaagtggatttcttattgacctatattcatgaaagcatataaattaaaatatttaaaattagatatgattcacactatattctgtttcatatgcagattttattctcacctgggccatttgcagatgagactgtagtttgcagatgagactgtagtttgcagatggcgtggaagcattcatcaggggagataaccataaaggatttggcctaattaccatactcaattgtcagtttacgtggttttgtgaatactggcaaaagcaattgtttttaaattaacaatggagagaatgataagatgagggaaggaaaaggcattcattattgacttacatgtcagtaaggtctgcttttatttctatgtactcctgtttgccaagctcaataatggacaaaggatacaaacacacacacatctactattttagataaatgtactgttatatatatatgtaaactactattgctctctttataatgattaatcactttattatgaatgaatgaatgaatttgatggatttaaaaaaaaaaaaaaaaaa

SEQ ID NO: 229 - DNA, 817 bp, Homo sapiens
gaaggaggcccagacagtgagggcaggagggagagaagagacgcagaaggagagcgagcgagagagaaagggttctggattggaggggagagcaagggagggaggaaggcggtgagagaggcgggggcctcgggagggtgaaaggagggaggagaagggcggggcacggaggcccgagcgagggacaagactccgactccagctctgacttttttcgcggctctcggcttccactgcagccatgtcactcctcttgctggtggtctcagcccttcacatcctcattcttatactgcttttcgtggccactttggacaagtcctggtggactctccctgggaaagagtccctgaatctctggtacgactgcacgtggaacaacgacaccaaaacatgggcctgcagtaatgtcagcgagaatggctggctgaaggcggtgcaggtcctcatggtgctctccctcattctctgctgtctctccttcatcctgttcatgttccagctctacaccatgcgacgaggaggtctcttctatgccaccggcctctgccagctttgcaccagcgtggcggtgtttactggcgccttgatctatgccattcacgccgaggagatcctggagaagcacccgcgagggggcagcttcggatactgcttcgccctggcctgggtggccttccccctcgccctggtcagcggcatcatctacatccacctacggaagcgggagtgagcgccccgcctcgctcggctgcccccgccccttcccggcccccctcgccgcgcgtcctccaaaaaaataaaactttaacggcgg

SEQ ID NO: 230 - DNA, 6591 bp, Homo sapiens
ggggggtctgctctgtgcggtgaagcttctcttcttggcacctgcctggcatcggaagagggccccttctccctccctgggcttttatgtggacactgtaatgcctcagttttctttctttctttttgtttttgacacagggtctcactctatcacccaagctggagtgcagtggcaccatcttagctcaccgcagcctcaaactccccagctcgggtgattcttcctgcctcagcctcctgagtagtagcagctgggaccacagacgtctgccaccaagcccagctgcaccgccagttccggggagggccctgggccagcggctgtccgccccccctcctttataaagtcctggcctcgggacagcccgcacagctgcccagcctgcggagacgggacagccctgtcccactcactctttcccctgctgctcctgccggcagctcagctggaaccatgggaggccgcgtctttctcgtctttctcgcattctgtgtctggctgactctgccgggagctgaaacccaggactccaggggctgtgcccggtggtgccctcaggactcctcgtgtgtcaatgccaccgcctgtcgctgcaatccagggttcagctctttttctgagatcatcaccacccccatggagacttgtgacgacatcaacgagtgtgcaacactgtcgaaagtgtcatgcggaaaattctcggactgctggaacacagaggggagctacgactgcgtgtgcagcccaggatatgagcctgtttctggggcaaaaacattcaagaatgagagcgagaacacgtgtcaagatgtggacgaatgtcagcagaacccaaggctctgtaaaagctacggcacctgcgtcaacaccctcggcagctacacgtgccagtgcctgcctggcttcaagctcaaacctgaggacccgaagctctgcacagatgtggacgagtgcagctccgggcagcatcagtgtgacagctccaccgtctgcttcaacaccgtgggttcatacagctgccgctgccgcccaggctggaagcccagacacggaatcccgaataaccaaaaggacactgtctgtgaagatatgactttctccacctggaccccgccccctggagtccacagccagacgctttcccgattcttcgacaaagtccaggacctgggcagagactacaagccaggcttggccaataacaccatccagagcatcttacaggcgctggatgagctgctggaggcccctggggacctggagaccctgccccgcttacagcagcactgtgtggccagtcacctgctggatggcctagaggatgtcctcagaggcctgagcaagaacctttccaatgggctgttgaacttcagttatcctgcaggcacagaattgtccctggaggtgcagaagcaagtagacaggagtgtcaccttgagacagaatcaggcagtgatgcagctcgactggaatcaggcacagaaatctggtgacccagggatgggcaagttgctggctgaggcccctctggtcctggaacctgagaagcagatgcttctgcatgagacacaccagggcttgctgcaggacggctcccccatcctgctctcagatgtgatctctgcctttctgagcaacaacgacacccaaaacctcagctccccagttaccttcaccttctcccaccgttcagtgatcccgagacagaaggtgctctgtgtcttctgggagcatggccagaatggatgtggtcactgggccaccacaggctgcagcacaataggcaccagagacaccagcaccatctgccgttgcacccacctgagcagctttgccgtcctcatggcccactacgatgtgcaggaggaggatcccgtgctgactgtcatcacctacatggggctgagcgtctctctgctgtgcctcctcctggcggccctcacttttctcctgtgtaaagccatccagaacaccagcacctcactgcatctgcagctctcgctctgcctcttcctggcccacctcctcttcctcgtggcaattgatcaaaccggacacaaggtgctgtgctccatcatcgccggtaccttgcactatctctacctggccaccttgacctggatgctgctggaggccctgtacctcttcctcactgcacggaacctgacggtggtcaactactcaagcatcaacagattcatgaagaagctcatgttccctgtgggctacggagtcccagctgtgacagtggccatttctgcagcctccaggcctcacctttatggaacaccttcccgctgctggctccaaccagaaaagggatttatatggggcttccttggacctgtctgcgccatcttctctgtgaatttagttctctttctggtgactctctggattttgaaaaacagactctcctccctcaatagtgaagtgtccaccctccggaacacaaggatgctggcatttaaagcgacagctcagctgttcatcctgggctgcacgtggtgtctgggcatcttgcaggtgggtccggctgcccgggtcatggcctacctcttcaccatcatcaacagcctgcagggtgtcttcatcttcctggtgtactgcctcctcagccagcaggtccgggagcaatatgggaaatggtccaaagggatcaggaaattgaaaactgagtctgagatgcacacactctccagcagtgctaaggctgacacctccaaacccagcacggttaactagaaaaatcttctgaataagatcttccctctttgcccgtggaaaatctgaacaatctttgagccatctagaggggaaagaaaagactttgttctgtgtgtttcaagaaattcaccatgtcagcaatatgaaggatgttatggaaggcgtgctaggcattcaattcctgcagaaaccggaaatcttccatgccctgcaatgtgctcatcaaactctcagcatatggacggccagctgtggcccatatcttggtcactctgaagcacaatatttatgaagctatagaacgttaagacctctttcacagcctctccttcctacaaagactcctccaaatcttaaaatgaagcaggaaaacgagcctaagaggactttcataccgacaacatctgaaaggactagaatgttcacaccacgatctggatttcttaattttttgtttttgtttttgttgttctctagttctacgggtttgattatttagtcatgtgaaaaatattgattactcacacatagatcaagagagacacggctcctgccttcatggagcttttaggggaaaatgaagtggctcttgcagctagagttgactcagaagccgaaattcctagaaatcaggtttctactgctaggcaattgaagtataaactattttataaacactgtcttctttcgtcttcacaccaacatgcagaaaagtttctaatctcagatcggggatgtgcaacaaattccatttcaaaggaatgacctgcaaaactcctaaatattccaagcaaatgcccttaaccctgtctgttatctgctttccttgaacagaaattctacatgaccataaaacctcgaagatgggtatggcacagttcatgccctgtaatcctagcactttgggagggtgaggcaggaggatggctcaagcccaggagtttgagaccagtgtgggcaacagagtgagaaccatctctacccaaaaaaaaaattaaaaattagccaagcatggtgatgatataggagttaaggagaaatcatttaggcaaatagcaagggtaggaagtcctcagtaaggttttccatttaatgaaaagcagcccccaaaatcattttcttttctaacaaagaacagcctgtaaaatcgagctgcagacatagacaagcaagctggaagcttccacgggtgaatgccggcagctgtgccaataggaaaaagctacctagactaggcatgtccaaaatggcggctccaagttcccttctctttgccagccatgtgtacagtaaaaagcaggcaacatagtgtcagccaaagctcatttgcataataagattagggtggggtggccagctcacataggggtaggccctaggtaaatcagacaccgccttctcaagcctgtctataaaatctggtacactatgacgagggtcagatttcccattcagacgcccctctcccatgcaagagaaagagctgttctcctttctctttcttttgcctattaaacctctgctcctggccaggcacagtggctcacgcctataatcccagcactttgggaggctgaggtggtcagatcacctaaggtcaggagttcaagaccagcctggtcaacatggtgaaatcttgtctctagtaaaaatacaaaaatatatgaaatctcacatagatgataatattaagttccaaaagcaactcaacctggtagattctaattttttttgaggcagggtcttgctttgtcacccatgctggagtacaatggcacaaacactgctcactgcagcctcgacctcccaaggcctaagcaatcctcctgcctcagtccccctccaggtatttgaaactacaggtgtgtaccaccacaccgggctaatttttgtattttttgtagagacgtgggtctcactatgctgcccaggctcaggtcttaatctcctgagctcaggcaatccgcaggcctcagcctccctaagtgcggggattacaggcttgagccactgcacctagcctctatttgttttacaaaagagaaattgagatcctgaatgttaagtgacttgcctgaggccatcccactaacaggagccagggttaggattcaaaccccatccaactggtcccagagctggagcttcttgcactgccctacactacctaccatctccatcctctgggcacctttttataagaaccaaaacattacagagcattgctttgtcaactcagctgggaacatttcccagtgcaactcacatttttcactgctctgtgcctgtccgtataagctcaatgagtattgatttaggggctttggagaactttgaatgctaccccccaagtaaccattgttggcaacctggtacctctacttttagccatttctccttctctataaatagtgcagaagtaacccacttggtaacaggcatccttgccaagcctccaccactaggtcagtgtaagaattaaagaaagaggaaagaaacacaaaaagtggcttgatggttaagacaggtttattttagagaaaacacacctgagaggggctgctggctgaattaggttagagtcttttctacagactaagagtgtttaaggatttagggtgggagagtttcttagaggcttggactgcttctgtgttttttttgttgtgcttatatgggagggagagtggtgtgtttgcttttatacatttttctgcagctgtaggcataccccccaagtctgcttttagcttccctattttagtgcacctggagggaaaggaatgtgcttattaaggcccactgttttactggggcccattgtatgagggtgaagtttggcagttacccaagagacttttcctccaccttcctctgtgcccgagctgttttatctgcattttactgtctgctttttttggctgcttatagtttttaaaaaagtaatttccttaaatccagaaggctaaaaatgaagctgaaacttaaagtggcggtgtttgtccaaaataacggggctcctgctctgccagtcagtaccctcaagtcactcctgatcctcaacctccatgcctaaggctggttcaagagaccacataatatctgccttttattacatacatgatgggtgcatgggattctgcgtgccctttgcttgatatagactgctaaggtgagatggggaatatcagagtcagctgctgcttgaggaagcagaacacacagctggaggcttggaacatgtgggtccctatgagtgtagagcccatatccccatagagtctacctagagcaggggtcgccaaatgttttcttaaagagcctgatagtgtatatgttaggctttgtgagccaggtatttacagcaactcaattctaccactgtggtatgaaaacagctatagacaatcataaatgaatgatcatggctatgttttaataaaactttacagacactgaacttgaacttccattgtgatatgaaaacagctatagacaatcataaatgaatgatcatggctatgttttaataaaactttatggacactgagcttgaacttcatatatcagtcatgtgacacaaaatatcattcttctttttatttgttttcacccatttgaaaaatgtaaaaactattcttagctgtacagaaacagatggtgggtcagatttgactcactgcccatagtttccagaccatgatgttcaggttcatggaagcacttcactctacactaatttattcatccattcatcacatatgtgatgagcacatacagacacacctcagagatattgcaggctccactccagatcaccacaataatgtgaatattgcaataaagcaagtcatacacatt

SEQ ID NO: 231 - DNA, 6345 bp, Homo sapiens
ggggggtctgctctgtgcggtgaagcttctcttcttggcacctgcctggcatcggaagagggccccttctccctccctgggcttttatgtggacactgtaatgcctcagttttctttctttctttttgtttttgacacagggtctcactctatcacccaagctggagtgcagtggcaccatcttagctcaccgcagcctcaaactccccagctcgggtgattcttcctgcctcagcctcctgagtagtagcagctgggaccacagacgtctgccaccaagcccagctgcaccgccagttccggggagggccctgggccagcggctgtccgccccccctcctttataaagtcctggcctcgggacagcccgcacagctgcccagcctgcggagacgggacagccctgtcccactcactctttcccctgctgctcctgccggcagctcagctggaaccatgggaggccgcgtctttctcgtctttctcgcattctgtgtctggctgactctgccgggagctgaaacccaggactccaggggctgtgcccggtggtgccctcaggactcctcgtgtgtcaatgccaccgcctgtcgctgcaatccagggttcagctctttttctgagatcatcaccacccccatggagacttgtgacgacatcaacgagtgtgcaacactgtcgaaagtgtcatgcggaaaattctcggactgctggaacacagaggggagctacgactgcgtgtgcagcccaggatatgagcctgtttctggggcaaaaacattcaagaatgagagcgagaacacgtgtcaagatatgactttctccacctggaccccgccccctggagtccacagccagacgctttcccgattcttcgacaaagtccaggacctgggcagagactacaagccaggcttggccaataacaccatccagagcatcttacaggcgctggatgagctgctggaggcccctggggacctggagaccctgccccgcttacagcagcactgtgtggccagtcacctgctggatggcctagaggatgtcctcagaggcctgagcaagaacctttccaatgggctgttgaacttcagttatcctgcaggcacagaattgtccctggaggtgcagaagcaagtagacaggagtgtcaccttgagacagaatcaggcagtgatgcagctcgactggaatcaggcacagaaatctggtgacccaggcccttctgtggtgggccttgtctccattccagggatgggcaagttgctggctgaggcccctctggtcctggaacctgagaagcagatgcttctgcatgagacacaccagggcttgctgcaggacggctcccccatcctgctctcagatgtgatctctgcctttctgagcaacaacgacacccaaaacctcagctccccagttaccttcaccttctcccaccgttcagtgatcccgagacagaaggtgctctgtgtcttctgggagcatggccagaatggatgtggtcactgggccaccacaggctgcagcacaataggcaccagagacaccagcaccatctgccgttgcacccacctgagcagctttgccgtcctcatggcccactacgatgtgcaggaggaggatcccgtgctgactgtcatcacctacatggggctgagcgtctctctgctgtgcctcctcctggcggccctcacttttctcctgtgtaaagccatccagaacaccagcacctcactgcatctgcagctctcgctctgcctcttcctggcccacctcctcttcctcgtggcaattgatcaaaccggacacaaggtgctgtgctccatcatcgccggtaccttgcactatctctacctggccaccttgacctggatgctgctggaggccctgtacctcttcctcactgcacggaacctgacggtggtcaactactcaagcatcaacagattcatgaagaagctcatgttccctgtgggctacggagtcccagctgtgacagtggccatttctgcagcctccaggcctcacctttatggaacaccttcccgctgctggctccaaccagaaaagggatttatatggggcttccttggacctgtctgcgccatcttctctgtgaatttagttctctttctggtgactctctggattttgaaaaacagactctcctccctcaatagtgaagtgtccaccctccggaacacaaggatgctggcatttaaagcgacagctcagctgttcatcctgggctgcacgtggtgtctgggcatcttgcaggtgggtccggctgcccgggtcatggcctacctcttcaccatcatcaacagcctgcagggtgtcttcatcttcctggtgtactgcctcctcagccagcaggtccgggagcaatatgggaaatggtccaaagggatcaggaaattgaaaactgagtctgagatgcacacactctccagcagtgctaaggctgacacctccaaacccagcacggttaactagaaaaatcttctgaataagatcttccctctttgcccgtggaaaatctgaacaatctttgagccatctagaggggaaagaaaagactttgttctgtgtgtttcaagaaattcaccatgtcagcaatatgaaggatgttatggaaggcgtgctaggcattcaattcctgcagaaaccggaaatcttccatgccctgcaatgtgctcatcaaactctcagcatatggacggccagctgtggcccatatcttggtcactctgaagcacaatatttatgaagctatagaacgttaagacctctttcacagcctctccttcctacaaagactcctccaaatcttaaaatgaagcaggaaaacgagcctaagaggactttcataccgacaacatctgaaaggactagaatgttcacaccacgatctggatttcttaattttttgtttttgtttttgttgttctctagttctacgggtttgattatttagtcatgtgaaaaatattgattactcacacatagatcaagagagacacggctcctgccttcatggagcttttaggggaaaatgaagtggctcttgcagctagagttgactcagaagccgaaattcctagaaatcaggtttctactgctaggcaattgaagtataaactattttataaacactgtcttctttcgtcttcacaccaacatgcagaaaagtttctaatctcagatcggggatgtgcaacaaattccatttcaaaggaatgacctgcaaaactcctaaatattccaagcaaatgcccttaaccctgtctgttatctgctttccttgaacagaaattctacatgaccataaaacctcgaagatgggtatggcacagttcatgccctgtaatcctagcactttgggagggtgaggcaggaggatggctcaagcccaggagtttgagaccagtgtgggcaacagagtgagaaccatctctacccaaaaaaaaaattaaaaattagccaagcatggtgatgatataggagttaaggagaaatcatttaggcaaatagcaagggtaggaagtcctcagtaaggttttccatttaatgaaaagcagcccccaaaatcattttcttttctaacaaagaacagcctgtaaaatcgagctgcagacatagacaagcaagctggaagcttccacgggtgaatgccggcagctgtgccaataggaaaaagctacctagactaggcatgtccaaaatggcggctccaagttcccttctctttgccagccatgtgtacagtaaaaagcaggcaacatagtgtcagccaaagctcatttgcataataagattagggtggggtggccagctcacataggggtaggccctaggtaaatcagacaccgccttctcaagcctgtctataaaatctggtacactatgacgagggtcagatttcccattcagacgcccctctcccatgcaagagaaagagctgttctcctttctctttcttttgcctattaaacctctgctcctggccaggcacagtggctcacgcctataatcccagcactttgggaggctgaggtggtcagatcacctaaggtcaggagttcaagaccagcctggtcaacatggtgaaatcttgtctctagtaaaaatacaaaaatatatgaaatctcacatagatgataatattaagttccaaaagcaactcaacctggtagattctaattttttttgaggcagggtcttgctttgtcacccatgctggagtacaatggcacaaacactgctcactgcagcctcgacctcccaaggcctaagcaatcctcctgcctcagtccccctccaggtatttgaaactacaggtgtgtaccaccacaccgggctaatttttgtattttttgtagagacgtgggtctcactatgctgcccaggctcaggtcttaatctcctgagctcaggcaatccgcaggcctcagcctccctaagtgcggggattacaggcttgagccactgcacctagcctctatttgttttacaaaagagaaattgagatcctgaatgttaagtgacttgcctgaggccatcccactaacaggagccagggttaggattcaaaccccatccaactggtcccagagctggagcttcttgcactgccctacactacctaccatctccatcctctgggcacctttttataagaaccaaaacattacagagcattgctttgtcaactcagctgggaacatttcccagtgcaactcacatttttcactgctctgtgcctgtccgtataagctcaatgagtattgatttaggggctttggagaactttgaatgctaccccccaagtaaccattgttggcaacctggtacctctacttttagccatttctccttctctataaatagtgcagaagtaacccacttggtaacaggcatccttgccaagcctccaccactaggtcagtgtaagaattaaagaaagaggaaagaaacacaaaaagtggcttgatggttaagacaggtttattttagagaaaacacacctgagaggggctgctggctgaattaggttagagtcttttctacagactaagagtgtttaaggatttagggtgggagagtttcttagaggcttggactgcttctgtgttttttttgttgtgcttatatgggagggagagtggtgtgtttgcttttatacatttttctgcagctgtaggcataccccccaagtctgcttttagcttccctattttagtgcacctggagggaaaggaatgtgcttattaaggcccactgttttactggggcccattgtatgagggtgaagtttggcagttacccaagagacttttcctccaccttcctctgtgcccgagctgttttatctgcattttactgtctgctttttttggctgcttatagtttttaaaaaagtaatttccttaaatccagaaggctaaaaatgaagctgaaacttaaagtggcggtgtttgtccaaaataacggggctcctgctctgccagtcagtaccctcaagtcactcctgatcctcaacctccatgcctaaggctggttcaagagaccacataatatctgccttttattacatacatgatgggtgcatgggattctgcgtgccctttgcttgatatagactgctaaggtgagatggggaatatcagagtcagctgctgcttgaggaagcagaacacacagctggaggcttggaacatgtgggtccctatgagtgtagagcccatatccccatagagtctacctagagcaggggtcgccaaatgttttcttaaagagcctgatagtgtatatgttaggctttgtgagccaggtatttacagcaactcaattctaccactgtggtatgaaaacagctatagacaatcataaatgaatgatcatggctatgttttaataaaactttacagacactgaacttgaacttccattgtgatatgaaaacagctatagacaatcataaatgaatgatcatggctatgttttaataaaactttatggacactgagcttgaacttcatatatcagtcatgtgacacaaaatatcattcttctttttatttgttttcacccatttgaaaaatgtaaaaactattcttagctgtacagaaacagatggtgggtcagatttgactcactgcccatagtttccagaccatgatgttcaggttcatggaagcacttcactctacactaatttattcatccattcatcacatatgtgatgagcacatacagacacacctcagagatattgcaggctccactccagatcaccacaataatgtgaatattgcaataaagcaagtcatacacatt

SEQ ID NO: 232 - DNA, 6738 bp, Homo sapiens
ggggggtctgctctgtgcggtgaagcttctcttcttggcacctgcctggcatcggaagagggccccttctccctccctgggcttttatgtggacactgtaatgcctcagttttctttctttctttttgtttttgacacagggtctcactctatcacccaagctggagtgcagtggcaccatcttagctcaccgcagcctcaaactccccagctcgggtgattcttcctgcctcagcctcctgagtagtagcagctgggaccacagacgtctgccaccaagcccagctgcaccgccagttccggggagggccctgggccagcggctgtccgccccccctcctttataaagtcctggcctcgggacagcccgcacagctgcccagcctgcggagacgggacagccctgtcccactcactctttcccctgctgctcctgccggcagctcagctggaaccatgggaggccgcgtctttctcgtctttctcgcattctgtgtctggctgactctgccgggagctgaaacccaggactccaggggctgtgcccggtggtgccctcaggactcctcgtgtgtcaatgccaccgcctgtcgctgcaatccagggttcagctctttttctgagatcatcaccacccccatggagacttgtgacgacatcaacgagtgtgcaacactgtcgaaagtgtcatgcggaaaattctcggactgctggaacacagaggggagctacgactgcgtgtgcagcccaggatatgagcctgtttctggggcaaaaacattcaagaatgagagcgagaacacgtgtcaagatgtggacgaatgtcagcagaacccaaggctctgtaaaagctacggcacctgcgtcaacaccctcggcagctacacgtgccagtgcctgcctggcttcaagctcaaacctgaggacccgaagctctgcacagatgtgaatgaatgcacctccggacaaaacccatgccacagctccacccactgcctcaacaacgtgggcagctatcagtgccgctgccgcccgggctggcaaccgattccggggtcccccaatggcccaaacaataccgtctgtgaagatgtggacgagtgcagctccgggcagcatcagtgtgacagctccaccgtctgcttcaacaccgtgggttcatacagctgccgctgccgcccaggctggaagcccagacacggaatcccgaataaccaaaaggacactgtctgtgaagatatgactttctccacctggaccccgccccctggagtccacagccagacgctttcccgattcttcgacaaagtccaggacctgggcagagactacaagccaggcttggccaataacaccatccagagcatcttacaggcgctggatgagctgctggaggcccctggggacctggagaccctgccccgcttacagcagcactgtgtggccagtcacctgctggatggcctagaggatgtcctcagaggcctgagcaagaacctttccaatgggctgttgaacttcagttatcctgcaggcacagaattgtccctggaggtgcagaagcaagtagacaggagtgtcaccttgagacagaatcaggcagtgatgcagctcgactggaatcaggcacagaaatctggtgacccagggatgggcaagttgctggctgaggcccctctggtcctggaacctgagaagcagatgcttctgcatgagacacaccagggcttgctgcaggacggctcccccatcctgctctcagatgtgatctctgcctttctgagcaacaacgacacccaaaacctcagctccccagttaccttcaccttctcccaccgttcagtgatcccgagacagaaggtgctctgtgtcttctgggagcatggccagaatggatgtggtcactgggccaccacaggctgcagcacaataggcaccagagacaccagcaccatctgccgttgcacccacctgagcagctttgccgtcctcatggcccactacgatgtgcaggaggaggatcccgtgctgactgtcatcacctacatggggctgagcgtctctctgctgtgcctcctcctggcggccctcacttttctcctgtgtaaagccatccagaacaccagcacctcactgcatctgcagctctcgctctgcctcttcctggcccacctcctcttcctcgtggcaattgatcaaaccggacacaaggtgctgtgctccatcatcgccggtaccttgcactatctctacctggccaccttgacctggatgctgctggaggccctgtacctcttcctcactgcacggaacctgacggtggtcaactactcaagcatcaacagattcatgaagaagctcatgttccctgtgggctacggagtcccagctgtgacagtggccatttctgcagcctccaggcctcacctttatggaacaccttcccgctgctggctccaaccagaaaagggatttatatggggcttccttggacctgtctgcgccatcttctctgtgaatttagttctctttctggtgactctctggattttgaaaaacagactctcctccctcaatagtgaagtgtccaccctccggaacacaaggatgctggcatttaaagcgacagctcagctgttcatcctgggctgcacgtggtgtctgggcatcttgcaggtgggtccggctgcccgggtcatggcctacctcttcaccatcatcaacagcctgcagggtgtcttcatcttcctggtgtactgcctcctcagccagcaggtccgggagcaatatgggaaatggtccaaagggatcaggaaattgaaaactgagtctgagatgcacacactctccagcagtgctaaggctgacacctccaaacccagcacggttaactagaaaaatcttctgaataagatcttccctctttgcccgtggaaaatctgaacaatctttgagccatctagaggggaaagaaaagactttgttctgtgtgtttcaagaaattcaccatgtcagcaatatgaaggatgttatggaaggcgtgctaggcattcaattcctgcagaaaccggaaatcttccatgccctgcaatgtgctcatcaaactctcagcatatggacggccagctgtggcccatatcttggtcactctgaagcacaatatttatgaagctatagaacgttaagacctctttcacagcctctccttcctacaaagactcctccaaatcttaaaatgaagcaggaaaacgagcctaagaggactttcataccgacaacatctgaaaggactagaatgttcacaccacgatctggatttcttaattttttgtttttgtttttgttgttctctagttctacgggtttgattatttagtcatgtgaaaaatattgattactcacacatagatcaagagagacacggctcctgccttcatggagcttttaggggaaaatgaagtggctcttgcagctagagttgactcagaagccgaaattcctagaaatcaggtttctactgctaggcaattgaagtataaactattttataaacactgtcttctttcgtcttcacaccaacatgcagaaaagtttctaatctcagatcggggatgtgcaacaaattccatttcaaaggaatgacctgcaaaactcctaaatattccaagcaaatgcccttaaccctgtctgttatctgctttccttgaacagaaattctacatgaccataaaacctcgaagatgggtatggcacagttcatgccctgtaatcctagcactttgggagggtgaggcaggaggatggctcaagcccaggagtttgagaccagtgtgggcaacagagtgagaaccatctctacccaaaaaaaaaattaaaaattagccaagcatggtgatgatataggagttaaggagaaatcatttaggcaaatagcaagggtaggaagtcctcagtaaggttttccatttaatgaaaagcagcccccaaaatcattttcttttctaacaaagaacagcctgtaaaatcgagctgcagacatagacaagcaagctggaagcttccacgggtgaatgccggcagctgtgccaataggaaaaagctacctagactaggcatgtccaaaatggcggctccaagttcccttctctttgccagccatgtgtacagtaaaaagcaggcaacatagtgtcagccaaagctcatttgcataataagattagggtggggtggccagctcacataggggtaggccctaggtaaatcagacaccgccttctcaagcctgtctataaaatctggtacactatgacgagggtcagatttcccattcagacgcccctctcccatgcaagagaaagagctgttctcctttctctttcttttgcctattaaacctctgctcctggccaggcacagtggctcacgcctataatcccagcactttgggaggctgaggtggtcagatcacctaaggtcaggagttcaagaccagcctggtcaacatggtgaaatcttgtctctagtaaaaatacaaaaatatatgaaatctcacatagatgataatattaagttccaaaagcaactcaacctggtagattctaattttttttgaggcagggtcttgctttgtcacccatgctggagtacaatggcacaaacactgctcactgcagcctcgacctcccaaggcctaagcaatcctcctgcctcagtccccctccaggtatttgaaactacaggtgtgtaccaccacaccgggctaatttttgtattttttgtagagacgtgggtctcactatgctgcccaggctcaggtcttaatctcctgagctcaggcaatccgcaggcctcagcctccctaagtgcggggattacaggcttgagccactgcacctagcctctatttgttttacaaaagagaaattgagatcctgaatgttaagtgacttgcctgaggccatcccactaacaggagccagggttaggattcaaaccccatccaactggtcccagagctggagcttcttgcactgccctacactacctaccatctccatcctctgggcacctttttataagaaccaaaacattacagagcattgctttgtcaactcagctgggaacatttcccagtgcaactcacatttttcactgctctgtgcctgtccgtataagctcaatgagtattgatttaggggctttggagaactttgaatgctaccccccaagtaaccattgttggcaacctggtacctctacttttagccatttctccttctctataaatagtgcagaagtaacccacttggtaacaggcatccttgccaagcctccaccactaggtcagtgtaagaattaaagaaagaggaaagaaacacaaaaagtggcttgatggttaagacaggtttattttagagaaaacacacctgagaggggctgctggctgaattaggttagagtcttttctacagactaagagtgtttaaggatttagggtgggagagtttcttagaggcttggactgcttctgtgttttttttgttgtgcttatatgggagggagagtggtgtgtttgcttttatacatttttctgcagctgtaggcataccccccaagtctgcttttagcttccctattttagtgcacctggagggaaaggaatgtgcttattaaggcccactgttttactggggcccattgtatgagggtgaagtttggcagttacccaagagacttttcctccaccttcctctgtgcccgagctgttttatctgcattttactgtctgctttttttggctgcttatagtttttaaaaaagtaatttccttaaatccagaaggctaaaaatgaagctgaaacttaaagtggcggtgtttgtccaaaataacggggctcctgctctgccagtcagtaccctcaagtcactcctgatcctcaacctccatgcctaaggctggttcaagagaccacataatatctgccttttattacatacatgatgggtgcatgggattctgcgtgccctttgcttgatatagactgctaaggtgagatggggaatatcagagtcagctgctgcttgaggaagcagaacacacagctggaggcttggaacatgtgggtccctatgagtgtagagcccatatccccatagagtctacctagagcaggggtcgccaaatgttttcttaaagagcctgatagtgtatatgttaggctttgtgagccaggtatttacagcaactcaattctaccactgtggtatgaaaacagctatagacaatcataaatgaatgatcatggctatgttttaataaaactttacagacactgaacttgaacttccattgtgatatgaaaacagctatagacaatcataaatgaatgatcatggctatgttttaataaaactttatggacactgagcttgaacttcatatatcagtcatgtgacacaaaatatcattcttctttttatttgttttcacccatttgaaaaatgtaaaaactattcttagctgtacagaaacagatggtgggtcagatttgactcactgcccatagtttccagaccatgatgttcaggttcatggaagcacttcactctacactaatttattcatccattcatcacatatgtgatgagcacatacagacacacctcagagatattgcaggctccactccagatcaccacaataatgtgaatattgcaataaagcaagtcatacacatt

SEQ ID NO: 233 - DNA, 6771 bp, Homo sapiens
ggggggtctgctctgtgcggtgaagcttctcttcttggcacctgcctggcatcggaagagggccccttctccctccctgggcttttatgtggacactgtaatgcctcagttttctttctttctttttgtttttgacacagggtctcactctatcacccaagctggagtgcagtggcaccatcttagctcaccgcagcctcaaactccccagctcgggtgattcttcctgcctcagcctcctgagtagtagcagctgggaccacagacgtctgccaccaagcccagctgcaccgccagttccggggagggccctgggccagcggctgtccgccccccctcctttataaagtcctggcctcgggacagcccgcacagctgcccagcctgcggagacgggacagccctgtcccactcactctttcccctgctgctcctgccggcagctcagctggaaccatgggaggccgcgtctttctcgtctttctcgcattctgtgtctggctgactctgccgggagctgaaacccaggactccaggggctgtgcccggtggtgccctcaggactcctcgtgtgtcaatgccaccgcctgtcgctgcaatccagggttcagctctttttctgagatcatcaccacccccatggagacttgtgacgacatcaacgagtgtgcaacactgtcgaaagtgtcatgcggaaaattctcggactgctggaacacagaggggagctacgactgcgtgtgcagcccaggatatgagcctgtttctggggcaaaaacattcaagaatgagagcgagaacacgtgtcaagatgtggacgaatgtcagcagaacccaaggctctgtaaaagctacggcacctgcgtcaacaccctcggcagctacacgtgccagtgcctgcctggcttcaagctcaaacctgaggacccgaagctctgcacagatgtgaatgaatgcacctccggacaaaacccatgccacagctccacccactgcctcaacaacgtgggcagctatcagtgccgctgccgcccgggctggcaaccgattccggggtcccccaatggcccaaacaataccgtctgtgaagatgtggacgagtgcagctccgggcagcatcagtgtgacagctccaccgtctgcttcaacaccgtgggttcatacagctgccgctgccgcccaggctggaagcccagacacggaatcccgaataaccaaaaggacactgtctgtgaagatatgactttctccacctggaccccgccccctggagtccacagccagacgctttcccgattcttcgacaaagtccaggacctgggcagagactacaagccaggcttggccaataacaccatccagagcatcttacaggcgctggatgagctgctggaggcccctggggacctggagaccctgccccgcttacagcagcactgtgtggccagtcacctgctggatggcctagaggatgtcctcagaggcctgagcaagaacctttccaatgggctgttgaacttcagttatcctgcaggcacagaattgtccctggaggtgcagaagcaagtagacaggagtgtcaccttgagacagaatcaggcagtgatgcagctcgactggaatcaggcacagaaatctggtgacccaggcccttctgtggtgggccttgtctccattccagggatgggcaagttgctggctgaggcccctctggtcctggaacctgagaagcagatgcttctgcatgagacacaccagggcttgctgcaggacggctcccccatcctgctctcagatgtgatctctgcctttctgagcaacaacgacacccaaaacctcagctccccagttaccttcaccttctcccaccgttcagtgatcccgagacagaaggtgctctgtgtcttctgggagcatggccagaatggatgtggtcactgggccaccacaggctgcagcacaataggcaccagagacaccagcaccatctgccgttgcacccacctgagcagctttgccgtcctcatggcccactacgatgtgcaggaggaggatcccgtgctgactgtcatcacctacatggggctgagcgtctctctgctgtgcctcctcctggcggccctcacttttctcctgtgtaaagccatccagaacaccagcacctcactgcatctgcagctctcgctctgcctcttcctggcccacctcctcttcctcgtggcaattgatcaaaccggacacaaggtgctgtgctccatcatcgccggtaccttgcactatctctacctggccaccttgacctggatgctgctggaggccctgtacctcttcctcactgcacggaacctgacggtggtcaactactcaagcatcaacagattcatgaagaagctcatgttccctgtgggctacggagtcccagctgtgacagtggccatttctgcagcctccaggcctcacctttatggaacaccttcccgctgctggctccaaccagaaaagggatttatatggggcttccttggacctgtctgcgccatcttctctgtgaatttagttctctttctggtgactctctggattttgaaaaacagactctcctccctcaatagtgaagtgtccaccctccggaacacaaggatgctggcatttaaagcgacagctcagctgttcatcctgggctgcacgtggtgtctgggcatcttgcaggtgggtccggctgcccgggtcatggcctacctcttcaccatcatcaacagcctgcagggtgtcttcatcttcctggtgtactgcctcctcagccagcaggtccgggagcaatatgggaaatggtccaaagggatcaggaaattgaaaactgagtctgagatgcacacactctccagcagtgctaaggctgacacctccaaacccagcacggttaactagaaaaatcttctgaataagatcttccctctttgcccgtggaaaatctgaacaatctttgagccatctagaggggaaagaaaagactttgttctgtgtgtttcaagaaattcaccatgtcagcaatatgaaggatgttatggaaggcgtgctaggcattcaattcctgcagaaaccggaaatcttccatgccctgcaatgtgctcatcaaactctcagcatatggacggccagctgtggcccatatcttggtcactctgaagcacaatatttatgaggctatagaacgttaagacctctttcacagcctctccttcctacaaagactcctccaaatcttaaaatgaagcaggaaaacgagcctaagaggactttcataccgacaacatctgaaaggactagaatgttcacaccacgatctggatttcttaattttttgtttttgtttttgttgttctctagttctacgggtttgattatttagtcatgtgaaaaatattgattactcacacatagatcaagagagacacggctcctgccttcatggagcttttaggggaaaatgaagtggctcttgcagctagagttgactcagaagccgaaattcctagaaatcaggtttctactgctaggcaattgaagtataaactattttataaacactgtcttctttcgtcttcacaccaacatgcagaaaagtttctaatctcagatcggggatgtgcaacaaattccatttcaaaggaatgacctgcaaaactcctaaatattccaagcaaatgcccttaaccctgtctgttatctgctttccttgaacagaaattctacatgaccataaaacctcgaagatgggtatggcacagttcatgccctgtaatcctagcactttgggagggtgaggcaggaggatggctcaagcccaggagtttgagaccagtgtgggcaacagagtgagaaccatctctacccaaaaaaaaaattaaaaattagccaagcatggtgatgatataggagttaaggagaaatcatttaggcaaatagcaagggtaggaagtcctcagtaaggttttccatttaatgaaaagcagcccccaaaatcattttcttttctaacaaagaacagcctgtaaaatcgagctgcagacatagacaagcaagctggaagcttccacgggtgaatgccggcagctgtgccaataggaaaaagctacctagactaggcatgtccaaaatggcggctccaagttcccttctctttgccagccatgtgtacagtaaaaagcaggcaacatagtgtcagccaaagctcatttgcataataagattagggtggggtggccagctcacataggggtaggccctaggtaaatcagacaccgccttctcaagcctgtctataaaatctggtacactatgacgagggtcagatttcccattcagacgcccctctcccatgcaagagaaagagctgttctcctttctctttcttttgcctattaaacctctgctcctggccaggcacagtggctcacgcctataatcccagcactttgggaggctgaggtggtcagatcacctaaggtcaggagttcaagaccagcctggtcaacatggtgaaatcttgtctctagtaaaaatacaaaaatatatgaaatctcacatagatgataatattaagttccaaaagcaactcaacctggtagattctaattttttttgaggcagggtcttgctttgtcacccatgctggagtacaatggcacaaacactgctcactgcagcctcgacctcccaaggcctaagcaatcctcctgcctcagtccccctccaggtatttgaaactacaggtgtgtaccaccacaccgggctaatttttgtattttttgtagagacgtgggtctcactatgctgcccaggctcaggtcttaatctcctgagctcaggcaatccgcaggcctcagcctccctaagtgcggggattacaggcttgagccactgcacctagcctctatttgttttacaaaagagaaattgagatcctgaatgttaagtgacttgcctgaggccatcccactaacaggagccagggttaggattcaaaccccatccaactggtcccagagctggagcttcttgcactgccctacactacctaccatctccatcctctgggcacctttttataagaaccaaaacattacagagcattgctttgtcaactcagctgggaacatttcccagtgcaactcacatttttcactgctctgtgcctgtccgtataagctcaatgagtattgatttaggggctttggagaactttgaatgctaccccccaagtaaccattgttggcaacctggtacctctacttttagccatttctccttctctataaatagtgcagaagtaacccacttggtaacaggcatccttgccaagcctccaccactaggtcagtgtaagaattaaagaaagaggaaagaaacacaaaaagtggcttgatggttaagacaggtttattttagagaaaacacacctgagaggggctgctggctgaattaggttagagtcttttctacagactaagagtgtttaaggatttagggtgggagagtttcttagaggcttggactgcttctgtgttttttttgttgtgcttatatgggagggagagtggtgtgtttgcttttatacatttttctgcagctgtaggcataccccccaagtctgcttttagcttccctattttagtgcacctggagggaaaggaatgtgcttattaaggcccactgttttactggggcccattgtatgagggtgaagtttggcagttacccaagagacttttcctccaccttcctctgtgcccgagctgttttatctgcattttactgtctgctttttttggctgcttatagtttttaaaaaagtaatttccttaaatccagaaggctaaaaatgaagctgaaacttaaagtggcggtgtttgtccaaaataacggggctcctgctctgccagtcagtaccctcaagtcactcctgatcctcaacctccatgcctaaggctggttcaagagaccacataatatctgccttttattacatacatgatgggtgcatgggattctgcgtgccctttgcttgatatagactgctaaggtgagatggggaatatcagagtcagctgctgcttgaggaagcagaacacacagctggaggcttggaacatgtgggtccctatgagtgtagagcccatatccccatagagtctacctagagcaggggtcgccaaatgttttcttaaagagcctgatagtgtatatgttaggctttgtgagccaggtatttacagcaactcaattctaccactgtggtatgaaaacagctatagacaatcataaatgaatgatcatggctatgttttaataaaactttacagacactgaacttgaacttccattgtgatatgaaaacagctatagacaatcataaatgaatgatcatggctatgttttaataaaactttatggacactgagcttgaacttcatatatcagtcatgtgacacaaaatatcattcttctttttatttgttttcacccatttgaaaaatgtaaaaactattcttagctgtacagaaacagatggtgggtcagatttgactcactgcccatagtttccagaccatgatgttcaggttcatggaagcacttcactctacactaatttattcatccattcatcacatatgtgatgagcacatacagacacacctcagagatattgcaggctccactccagatcaccacaataatgtgaatattgcaataaagcaagtcatacacatt

SEQ ID NO: 234 - DNA, 6492 bp, Homo sapiens
ggggggtctgctctgtgcggtgaagcttctcttcttggcacctgcctggcatcggaagagggccccttctccctccctgggcttttatgtggacactgtaatgcctcagttttctttctttctttttgtttttgacacagggtctcactctatcacccaagctggagtgcagtggcaccatcttagctcaccgcagcctcaaactccccagctcgggtgattcttcctgcctcagcctcctgagtagtagcagctgggaccacagacgtctgccaccaagcccagctgcaccgccagttccggggagggccctgggccagcggctgtccgccccccctcctttataaagtcctggcctcgggacagcccgcacagctgcccagcctgcggagacgggacagccctgtcccactcactctttcccctgctgctcctgccggcagctcagctggaaccatgggaggccgcgtctttctcgtctttctcgcattctgtgtctggctgactctgccgggagctgaaacccaggactccaggggctgtgcccggtggtgccctcaggactcctcgtgtgtcaatgccaccgcctgtcgctgcaatccagggttcagctctttttctgagatcatcaccacccccatggagacttgtgacgacatcaacgagtgtgcaacactgtcgaaagtgtcatgcggaaaattctcggactgctggaacacagaggggagctacgactgcgtgtgcagcccaggatatgagcctgtttctggggcaaaaacattcaagaatgagagcgagaacacgtgtcaagatgtggacgagtgcagctccgggcagcatcagtgtgacagctccaccgtctgcttcaacaccgtgggttcatacagctgccgctgccgcccaggctggaagcccagacacggaatcccgaataaccaaaaggacactgtctgtgaagatatgactttctccacctggaccccgccccctggagtccacagccagacgctttcccgattcttcgacaaagtccaggacctgggcagagactacaagccaggcttggccaataacaccatccagagcatcttacaggcgctggatgagctgctggaggcccctggggacctggagaccctgccccgcttacagcagcactgtgtggccagtcacctgctggatggcctagaggatgtcctcagaggcctgagcaagaacctttccaatgggctgttgaacttcagttatcctgcaggcacagaattgtccctggaggtgcagaagcaagtagacaggagtgtcaccttgagacagaatcaggcagtgatgcagctcgactggaatcaggcacagaaatctggtgacccaggcccttctgtggtgggccttgtctccattccagggatgggcaagttgctggctgaggcccctctggtcctggaacctgagaagcagatgcttctgcatgagacacaccagggcttgctgcaggacggctcccccatcctgctctcagatgtgatctctgcctttctgagcaacaacgacacccaaaacctcagctccccagttaccttcaccttctcccaccgttcagtgatcccgagacagaaggtgctctgtgtcttctgggagcatggccagaatggatgtggtcactgggccaccacaggctgcagcacaataggcaccagagacaccagcaccatctgccgttgcacccacctgagcagctttgccgtcctcatggcccactacgatgtgcaggaggaggatcccgtgctgactgtcatcacctacatggggctgagcgtctctctgctgtgcctcctcctggcggccctcacttttctcctgtgtaaagccatccagaacaccagcacctcactgcatctgcagctctcgctctgcctcttcctggcccacctcctcttcctcgtggcaattgatcaaaccggacacaaggtgctgtgctccatcatcgccggtaccttgcactatctctacctggccaccttgacctggatgctgctggaggccctgtacctcttcctcactgcacggaacctgacggtggtcaactactcaagcatcaacagattcatgaagaagctcatgttccctgtgggctacggagtcccagctgtgacagtggccatttctgcagcctccaggcctcacctttatggaacaccttcccgctgctggctccaaccagaaaagggatttatatggggcttccttggacctgtctgcgccatcttctctgtgaatttagttctctttctggtgactctctggattttgaaaaacagactctcctccctcaatagtgaagtgtccaccctccggaacacaaggatgctggcatttaaagcgacagctcagctgttcatcctgggctgcacgtggtgtctgggcatcttgcaggtgggtccggctgcccgggtcatggcctacctcttcaccatcatcaacagcctgcagggtgtcttcatcttcctggtgtactgcctcctcagccagcaggtccgggagcaatatgggaaatggtccaaagggatcaggaaattgaaaactgagtctgagatgcacacactctccagcagtgctaaggctgacacctccaaacccagcacggttaactagaaaaatcttctgaataagatcttccctctttgcccgtggaaaatctgaacaatctttgagccatctagaggggaaagaaaagactttgttctgtgtgtttcaagaaattcaccatgtcagcaatatgaaggatgttatggaaggcgtgctaggcattcaattcctgcagaaaccggaaatcttccatgccctgcaatgtgctcatcaaactctcagcatatggacggccagctgtggcccatatcttggtcactctgaagcacaatatttatgaagctatagaacgttaagacctctttcacagcctctccttcctacaaagactcctccaaatcttaaaatgaagcaggaaaacgagcctaagaggactttcataccgacaacatctgaaaggactagaatgttcacaccacgatctggatttcttaattttttgtttttgtttttgttgttctctagttctacgggtttgattatttagtcatgtgaaaaatattgattactcacacatagatcaagagagacacggctcctgccttcatggagcttttaggggaaaatgaagtggctcttgcagctagagttgactcagaagccgaaattcctagaaatcaggtttctactgctaggcaattgaagtataaactattttataaacactgtcttctttcgtcttcacaccaacatgcagaaaagtttctaatctcagatcggggatgtgcaacaaattccatttcaaaggaatgacctgcaaaactcctaaatattccaagcaaatgcccttaaccctgtctgttatctgctttccttgaacagaaattctacatgaccataaaacctcgaagatgggtatggcacagttcatgccctgtaatcctagcactttgggagggtgaggcaggaggatggctcaagcccaggagtttgagaccagtgtgggcaacagagtgagaaccatctctacccaaaaaaaaaattaaaaattagccaagcatggtgatgatataggagttaaggagaaatcatttaggcaaatagcaagggtaggaagtcctcagtaaggttttccatttaatgaaaagcagcccccaaaatcattttcttttctaacaaagaacagcctgtaaaatcgagctgcagacatagacaagcaagctggaagcttccacgggtgaatgccggcagctgtgccaataggaaaaagctacctagactaggcatgtccaaaatggcggctccaagttcccttctctttgccagccatgtgtacagtaaaaagcaggcaacatagtgtcagccaaagctcatttgcataataagattagggtggggtggccagctcacataggggtaggccctaggtaaatcagacaccgccttctcaagcctgtctataaaatctggtacactatgacgagggtcagatttcccattcagacgcccctctcccatgcaagagaaagagctgttctcctttctctttcttttgcctattaaacctctgctcctggccaggcacagtggctcacgcctataatcccagcactttgggaggctgaggtggtcagatcacctaaggtcaggagttcaagaccagcctggtcaacatggtgaaatcttgtctctagtaaaaatacaaaaatatatgaaatctcacatagatgataatattaagttccaaaagcaactcaacctggtagattctaattttttttgaggcagggtcttgctttgtcacccatgctggagtacaatggcacaaacactgctcactgcagcctcgacctcccaaggcctaagcaatcctcctgcctcagtccccctccaggtatttgaaactacaggtgtgtaccaccacaccgggctaatttttgtattttttgtagagacgtgggtctcactatgctgcccaggctcaggtcttaatctcctgagctcaggcaatccgcaggcctcagcctccctaagtgcggggattacaggcttgagccactgcacctagcctctatttgttttacaaaagagaaattgagatcctgaatgttaagtgacttgcctgaggccatcccactaacaggagccagggttaggattcaaaccccatccaactggtcccagagctggagcttcttgcactgccctacactacctaccatctccatcctctgggcacctttttataagaaccaaaacattacagagcattgctttgtcaactcagctgggaacatttcccagtgcaactcacatttttcactgctctgtgcctgtccgtataagctcaatgagtattgatttaggggctttggagaactttgaatgctaccccccaagtaaccattgttggcaacctggtacctctacttttagccatttctccttctctataaatagtgcagaagtaacccacttggtaacaggcatccttgccaagcctccaccactaggtcagtgtaagaattaaagaaagaggaaagaaacacaaaaagtggcttgatggttaagacaggtttattttagagaaaacacacctgagaggggctgctggctgaattaggttagagtcttttctacagactaagagtgtttaaggatttagggtgggagagtttcttagaggcttggactgcttctgtgttttttttgttgtgcttatatgggagggagagtggtgtgtttgcttttatacatttttctgcagctgtaggcataccccccaagtctgcttttagcttccctattttagtgcacctggagggaaaggaatgtgcttattaaggcccactgttttactggggcccattgtatgagggtgaagtttggcagttacccaagagacttttcctccaccttcctctgtgcccgagctgttttatctgcattttactgtctgctttttttggctgcttatagtttttaaaaaagtaatttccttaaatccagaaggctaaaaatgaagctgaaacttaaagtggcggtgtttgtccaaaataacggggctcctgctctgccagtcagtaccctcaagtcactcctgatcctcaacctccatgcctaaggctggttcaagagaccacataatatctgccttttattacatacatgatgggtgcatgggattctgcgtgccctttgcttgatatagactgctaaggtgagatggggaatatcagagtcagctgctgcttgaggaagcagaacacacagctggaggcttggaacatgtgggtccctatgagtgtagagcccatatccccatagagtctacctagagcaggggtcgccaaatgttttcttaaagagcctgatagtgtatatgttaggctttgtgagccaggtatttacagcaactcaattctaccactgtggtatgaaaacagctatagacaatcataaatgaatgatcatggctatgttttaataaaactttacagacactgaacttgaacttccattgtgatatgaaaacagctatagacaatcataaatgaatgatcatggctatgttttaataaaactttatggacactgagcttgaacttcatatatcagtcatgtgacacaaaatatcattcttctttttatttgttttcacccatttgaaaaatgtaaaaactattcttagctgtacagaaacagatggtgggtcagatttgactcactgcccatagtttccagaccatgatgttcaggttcatggaagcacttcactctacactaatttattcatccattcatcacatatgtgatgagcacatacagacacacctcagagatattgcaggctccactccagatcaccacaataatgtgaatattgcaataaagcaagtcatacacatt

SEQ ID NO: 235 - DNA, 6459 bp, Homo sapiens
ggggggtctgctctgtgcggtgaagcttctcttcttggcacctgcctggcatcggaagagggccccttctccctccctgggcttttatgtggacactgtaatgcctcagttttctttctttctttttgtttttgacacagggtctcactctatcacccaagctggagtgcagtggcaccatcttagctcaccgcagcctcaaactccccagctcgggtgattcttcctgcctcagcctcctgagtagtagcagctgggaccacagacgtctgccaccaagcccagctgcaccgccagttccggggagggccctgggccagcggctgtccgccccccctcctttataaagtcctggcctcgggacagcccgcacagctgcccagcctgcggagacgggacagccctgtcccactcactctttcccctgctgctcctgccggcagctcagctggaaccatgggaggccgcgtctttctcgtctttctcgcattctgtgtctggctgactctgccgggagctgaaacccaggactccaggggctgtgcccggtggtgccctcaggactcctcgtgtgtcaatgccaccgcctgtcgctgcaatccagggttcagctctttttctgagatcatcaccacccccatggagacttgtgacgacatcaacgagtgtgcaacactgtcgaaagtgtcatgcggaaaattctcggactgctggaacacagaggggagctacgactgcgtgtgcagcccaggatatgagcctgtttctggggcaaaaacattcaagaatgagagcgagaacacgtgtcaagatgtggacgagtgcagctccgggcagcatcagtgtgacagctccaccgtctgcttcaacaccgtgggttcatacagctgccgctgccgcccaggctggaagcccagacacggaatcccgaataaccaaaaggacactgtctgtgaagatatgactttctccacctggaccccgccccctggagtccacagccagacgctttcccgattcttcgacaaagtccaggacctgggcagagactacaagccaggcttggccaataacaccatccagagcatcttacaggcgctggatgagctgctggaggcccctggggacctggagaccctgccccgcttacagcagcactgtgtggccagtcacctgctggatggcctagaggatgtcctcagaggcctgagcaagaacctttccaatgggctgttgaacttcagttatcctgcaggcacagaattgtccctggaggtgcagaagcaagtagacaggagtgtcaccttgagacagaatcaggcagtgatgcagctcgactggaatcaggcacagaaatctggtgacccagggatgggcaagttgctggctgaggcccctctggtcctggaacctgagaagcagatgcttctgcatgagacacaccagggcttgctgcaggacggctcccccatcctgctctcagatgtgatctctgcctttctgagcaacaacgacacccaaaacctcagctccccagttaccttcaccttctcccaccgttcagtgatcccgagacagaaggtgctctgtgtcttctgggagcatggccagaatggatgtggtcactgggccaccacaggctgcagcacaataggcaccagagacaccagcaccatctgccgttgcacccacctgagcagctttgccgtcctcatggcccactacgatgtgcaggaggaggatcccgtgctgactgtcatcacctacatggggctgagcgtctctctgctgtgcctcctcctggcggccctcacttttctcctgtgtaaagccatccagaacaccagcacctcactgcatctgcagctctcgctctgcctcttcctggcccacctcctcttcctcgtggcaattgatcaaaccggacacaaggtgctgtgctccatcatcgccggtaccttgcactatctctacctggccaccttgacctggatgctgctggaggccctgtacctcttcctcactgcacggaacctgacggtggtcaactactcaagcatcaacagattcatgaagaagctcatgttccctgtgggctacggagtcccagctgtgacagtggccatttctgcagcctccaggcctcacctttatggaacaccttcccgctgctggctccaaccagaaaagggatttatatggggcttccttggacctgtctgcgccatcttctctgtgaatttagttctctttctggtgactctctggattttgaaaaacagactctcctccctcaatagtgaagtgtccaccctccggaacacaaggatgctggcatttaaagcgacagctcagctgttcatcctgggctgcacgtggtgtctgggcatcttgcaggtgggtccggctgcccgggtcatggcctacctcttcaccatcatcaacagcctgcagggtgtcttcatcttcctggtgtactgcctcctcagccagcaggtccgggagcaatatgggaaatggtccaaagggatcaggaaattgaaaactgagtctgagatgcacacactctccagcagtgctaaggctgacacctccaaacccagcacggttaactagaaaaatcttctgaataagatcttccctctttgcccgtggaaaatctgaacaatctttgagccatctagaggggaaagaaaagactttgttctgtgtgtttcaagaaattcaccatgtcagcaatatgaaggatgttatggaaggcgtgctaggcattcaattcctgcagaaaccggaaatcttccatgccctgcaatgtgctcatcaaactctcagcatatggacggccagctgtggcccatatcttggtcactctgaagcacaatatttatgaagctatagaacgttaagacctctttcacagcctctccttcctacaaagactcctccaaatcttaaaatgaagcaggaaaacgagcctaagaggactttcataccgacaacatctgaaaggactagaatgttcacaccacgatctggatttcttaattttttgtttttgtttttgttgttctctagttctacgggtttgattatttagtcatgtgaaaaatattgattactcacacatagatcaagagagacacggctcctgccttcatggagcttttaggggaaaatgaagtggctcttgcagctagagttgactcagaagccgaaattcctagaaatcaggtttctactgctaggcaattgaagtataaactattttataaacactgtcttctttcgtcttcacaccaacatgcagaaaagtttctaatctcagatcggggatgtgcaacaaattccatttcaaaggaatgacctgcaaaactcctaaatattccaagcaaatgcccttaaccctgtctgttatctgctttccttgaacagaaattctacatgaccataaaacctcgaagatgggtatggcacagttcatgccctgtaatcctagcactttgggagggtgaggcaggaggatggctcaagcccaggagtttgagaccagtgtgggcaacagagtgagaaccatctctacccaaaaaaaaaattaaaaattagccaagcatggtgatgatataggagttaaggagaaatcatttaggcaaatagcaagggtaggaagtcctcagtaaggttttccatttaatgaaaagcagcccccaaaatcattttcttttctaacaaagaacagcctgtaaaatcgagctgcagacatagacaagcaagctggaagcttccacgggtgaatgccggcagctgtgccaataggaaaaagctacctagactaggcatgtccaaaatggcggctccaagttcccttctctttgccagccatgtgtacagtaaaaagcaggcaacatagtgtcagccaaagctcatttgcataataagattagggtggggtggccagctcacataggggtaggccctaggtaaatcagacaccgccttctcaagcctgtctataaaatctggtacactatgacgagggtcagatttcccattcagacgcccctctcccatgcaagagaaagagctgttctcctttctctttcttttgcctattaaacctctgctcctggccaggcacagtggctcacgcctataatcccagcactttgggaggctgaggtggtcagatcacctaaggtcaggagttcaagaccagcctggtcaacatggtgaaatcttgtctctagtaaaaatacaaaaatatatgaaatctcacatagatgataatattaagttccaaaagcaactcaacctggtagattctaattttttttgaggcagggtcttgctttgtcacccatgctggagtacaatggcacaaacactgctcactgcagcctcgacctcccaaggcctaagcaatcctcctgcctcagtccccctccaggtatttgaaactacaggtgtgtaccaccacaccgggctaatttttgtattttttgtagagacgtgggtctcactatgctgcccaggctcaggtcttaatctcctgagctcaggcaatccgcaggcctcagcctccctaagtgcggggattacaggcttgagccactgcacctagcctctatttgttttacaaaagagaaattgagatcctgaatgttaagtgacttgcctgaggccatcccactaacaggagccagggttaggattcaaaccccatccaactggtcccagagctggagcttcttgcactgccctacactacctaccatctccatcctctgggcacctttttataagaaccaaaacattacagagcattgctttgtcaactcagctgggaacatttcccagtgcaactcacatttttcactgctctgtgcctgtccgtataagctcaatgagtattgatttaggggctttggagaactttgaatgctaccccccaagtaaccattgttggcaacctggtacctctacttttagccatttctccttctctataaatagtgcagaagtaacccacttggtaacaggcatccttgccaagcctccaccactaggtcagtgtaagaattaaagaaagaggaaagaaacacaaaaagtggcttgatggttaagacaggtttattttagagaaaacacacctgagaggggctgctggctgaattaggttagagtcttttctacagactaagagtgtttaaggatttagggtgggagagtttcttagaggcttggactgcttctgtgttttttttgttgtgcttatatgggagggagagtggtgtgtttgcttttatacatttttctgcagctgtaggcataccccccaagtctgcttttagcttccctattttagtgcacctggagggaaaggaatgtgcttattaaggcccactgttttactggggcccattgtatgagggtgaagtttggcagttacccaagagacttttcctccaccttcctctgtgcccgagctgttttatctgcattttactgtctgctttttttggctgcttatagtttttaaaaaagtaatttccttaaatccagaaggctaaaaatgaagctgaaacttaaagtggcggtgtttgtccaaaataacggggctcctgctctgccagtcagtaccctcaagtcactcctgatcctcaacctccatgcctaaggctggttcaagagaccacataatatctgccttttattacatacatgatgggtgcatgggattctgcgtgccctttgcttgatatagactgctaaggtgagatggggaatatcagagtcagctgctgcttgaggaagcagaacacacagctggaggcttggaacatgtgggtccctatgagtgtagagcccatatccccatagagtctacctagagcaggggtcgccaaatgttttcttaaagagcctgatagtgtatatgttaggctttgtgagccaggtatttacagcaactcaattctaccactgtggtatgaaaacagctatagacaatcataaatgaatgatcatggctatgttttaataaaactttacagacactgaacttgaacttccattgtgatatgaaaacagctatagacaatcataaatgaatgatcatggctatgttttaataaaactttatggacactgagcttgaacttcatatatcagtcatgtgacacaaaatatcattcttctttttatttgttttcacccatttgaaaaatgtaaaaactattcttagctgtacagaaacagatggtgggtcagatttgactcactgcccatagtttccagaccatgatgttcaggttcatggaagcacttcactctacactaatttattcatccattcatcacatatgtgatgagcacatacagacacacctcagagatattgcaggctccactccagatcaccacaataatgtgaatattgcaataaagcaagtcatacacatt

SEQ ID NO: 236 - DNA, 6624 bp, Homo sapiens
ggggggtctgctctgtgcggtgaagcttctcttcttggcacctgcctggcatcggaagagggccccttctccctccctgggcttttatgtggacactgtaatgcctcagttttctttctttctttttgtttttgacacagggtctcactctatcacccaagctggagtgcagtggcaccatcttagctcaccgcagcctcaaactccccagctcgggtgattcttcctgcctcagcctcctgagtagtagcagctgggaccacagacgtctgccaccaagcccagctgcaccgccagttccggggagggccctgggccagcggctgtccgccccccctcctttataaagtcctggcctcgggacagcccgcacagctgcccagcctgcggagacgggacagccctgtcccactcactctttcccctgctgctcctgccggcagctcagctggaaccatgggaggccgcgtctttctcgtctttctcgcattctgtgtctggctgactctgccgggagctgaaacccaggactccaggggctgtgcccggtggtgccctcaggactcctcgtgtgtcaatgccaccgcctgtcgctgcaatccagggttcagctctttttctgagatcatcaccacccccatggagacttgtgacgacatcaacgagtgtgcaacactgtcgaaagtgtcatgcggaaaattctcggactgctggaacacagaggggagctacgactgcgtgtgcagcccaggatatgagcctgtttctggggcaaaaacattcaagaatgagagcgagaacacgtgtcaagatgtggacgaatgtcagcagaacccaaggctctgtaaaagctacggcacctgcgtcaacaccctcggcagctacacgtgccagtgcctgcctggcttcaagctcaaacctgaggacccgaagctctgcacagatgtggacgagtgcagctccgggcagcatcagtgtgacagctccaccgtctgcttcaacaccgtgggttcatacagctgccgctgccgcccaggctggaagcccagacacggaatcccgaataaccaaaaggacactgtctgtgaagatatgactttctccacctggaccccgccccctggagtccacagccagacgctttcccgattcttcgacaaagtccaggacctgggcagagactacaagccaggcttggccaataacaccatccagagcatcttacaggcgctggatgagctgctggaggcccctggggacctggagaccctgccccgcttacagcagcactgtgtggccagtcacctgctggatggcctagaggatgtcctcagaggcctgagcaagaacctttccaatgggctgttgaacttcagttatcctgcaggcacagaattgtccctggaggtgcagaagcaagtagacaggagtgtcaccttgagacagaatcaggcagtgatgcagctcgactggaatcaggcacagaaatctggtgacccaggcccttctgtggtgggccttgtctccattccagggatgggcaagttgctggctgaggcccctctggtcctggaacctgagaagcagatgcttctgcatgagacacaccagggcttgctgcaggacggctcccccatcctgctctcagatgtgatctctgcctttctgagcaacaacgacacccaaaacctcagctccccagttaccttcaccttctcccaccgttcagtgatcccgagacagaaggtgctctgtgtcttctgggagcatggccagaatggatgtggtcactgggccaccacaggctgcagcacaataggcaccagagacaccagcaccatctgccgttgcacccacctgagcagctttgccgtcctcatggcccactacgatgtgcaggaggaggatcccgtgctgactgtcatcacctacatggggctgagcgtctctctgctgtgcctcctcctggcggccctcacttttctcctgtgtaaagccatccagaacaccagcacctcactgcatctgcagctctcgctctgcctcttcctggcccacctcctcttcctcgtggcaattgatcaaaccggacacaaggtgctgtgctccatcatcgccggtaccttgcactatctctacctggccaccttgacctggatgctgctggaggccctgtacctcttcctcactgcacggaacctgacggtggtcaactactcaagcatcaacagattcatgaagaagctcatgttccctgtgggctacggagtcccagctgtgacagtggccatttctgcagcctccaggcctcacctttatggaacaccttcccgctgctggctccaaccagaaaagggatttatatggggcttccttggacctgtctgcgccatcttctctgtgaatttagttctctttctggtgactctctggattttgaaaaacagactctcctccctcaatagtgaagtgtccaccctccggaacacaaggatgctggcatttaaagcgacagctcagctgttcatcctgggctgcacgtggtgtctgggcatcttgcaggtgggtccggctgcccgggtcatggcctacctcttcaccatcatcaacagcctgcagggtgtcttcatcttcctggtgtactgcctcctcagccagcaggtccgggagcaatatgggaaatggtccaaagggatcaggaaattgaaaactgagtctgagatgcacacactctccagcagtgctaaggctgacacctccaaacccagcacggttaactagaaaaatcttctgaataagatcttccctctttgcccgtggaaaatctgaacaatctttgagccatctagaggggaaagaaaagactttgttctgtgtgtttcaagaaattcaccatgtcagcaatatgaaggatgttatggaaggcgtgctaggcattcaattcctgcagaaaccggaaatcttccatgccctgcaatgtgctcatcaaactctcagcatatggacggccagctgtggcccatatcttggtcactctgaagcacaatatttatgaagctatagaacgttaagacctctttcacagcctctccttcctacaaagactcctccaaatcttaaaatgaagcaggaaaacgagcctaagaggactttcataccgacaacatctgaaaggactagaatgttcacaccacgatctggatttcttaattttttgtttttgtttttgttgttctctagttctacgggtttgattatttagtcatgtgaaaaatattgattactcacacatagatcaagagagacacggctcctgccttcatggagcttttaggggaaaatgaagtggctcttgcagctagagttgactcagaagccgaaattcctagaaatcaggtttctactgctaggcaattgaagtataaactattttataaacactgtcttctttcgtcttcacaccaacatgcagaaaagtttctaatctcagatcggggatgtgcaacaaattccatttcaaaggaatgacctgcaaaactcctaaatattccaagcaaatgcccttaaccctgtctgttatctgctttccttgaacagaaattctacatgaccataaaacctcgaagatgggtatggcacagttcatgccctgtaatcctagcactttgggagggtgaggcaggaggatggctcaagcccaggagtttgagaccagtgtgggcaacagagtgagaaccatctctacccaaaaaaaaaattaaaaattagccaagcatggtgatgatataggagttaaggagaaatcatttaggcaaatagcaagggtaggaagtcctcagtaaggttttccatttaatgaaaagcagcccccaaaatcattttcttttctaacaaagaacagcctgtaaaatcgagctgcagacatagacaagcaagctggaagcttccacgggtgaatgccggcagctgtgccaataggaaaaagctacctagactaggcatgtccaaaatggcggctccaagttcccttctctttgccagccatgtgtacagtaaaaagcaggcaacatagtgtcagccaaagctcatttgcataataagattagggtggggtggccagctcacataggggtaggccctaggtaaatcagacaccgccttctcaagcctgtctataaaatctggtacactatgacgagggtcagatttcccattcagacgcccctctcccatgcaagagaaagagctgttctcctttctctttcttttgcctattaaacctctgctcctggccaggcacagtggctcacgcctataatcccagcactttgggaggctgaggtggtcagatcacctaaggtcaggagttcaagaccagcctggtcaacatggtgaaatcttgtctctagtaaaaatacaaaaatatatgaaatctcacatagatgataatattaagttccaaaagcaactcaacctggtagattctaattttttttgaggcagggtcttgctttgtcacccatgctggagtacaatggcacaaacactgctcactgcagcctcgacctcccaaggcctaagcaatcctcctgcctcagtccccctccaggtatttgaaactacaggtgtgtaccaccacaccgggctaatttttgtattttttgtagagacgtgggtctcactatgctgcccaggctcaggtcttaatctcctgagctcaggcaatccgcaggcctcagcctccctaagtgcggggattacaggcttgagccactgcacctagcctctatttgttttacaaaagagaaattgagatcctgaatgttaagtgacttgcctgaggccatcccactaacaggagccagggttaggattcaaaccccatccaactggtcccagagctggagcttcttgcactgccctacactacctaccatctccatcctctgggcacctttttataagaaccaaaacattacagagcattgctttgtcaactcagctgggaacatttcccagtgcaactcacatttttcactgctctgtgcctgtccgtataagctcaatgagtattgatttaggggctttggagaactttgaatgctaccccccaagtaaccattgttggcaacctggtacctctacttttagccatttctccttctctataaatagtgcagaagtaacccacttggtaacaggcatccttgccaagcctccaccactaggtcagtgtaagaattaaagaaagaggaaagaaacacaaaaagtggcttgatggttaagacaggtttattttagagaaaacacacctgagaggggctgctggctgaattaggttagagtcttttctacagactaagagtgtttaaggatttagggtgggagagtttcttagaggcttggactgcttctgtgttttttttgttgtgcttatatgggagggagagtggtgtgtttgcttttatacatttttctgcagctgtaggcataccccccaagtctgcttttagcttccctattttagtgcacctggagggaaaggaatgtgcttattaaggcccactgttttactggggcccattgtatgagggtgaagtttggcagttacccaagagacttttcctccaccttcctctgtgcccgagctgttttatctgcattttactgtctgctttttttggctgcttatagtttttaaaaaagtaatttccttaaatccagaaggctaaaaatgaagctgaaacttaaagtggcggtgtttgtccaaaataacggggctcctgctctgccagtcagtaccctcaagtcactcctgatcctcaacctccatgcctaaggctggttcaagagaccacataatatctgccttttattacatacatgatgggtgcatgggattctgcgtgccctttgcttgatatagactgctaaggtgagatggggaatatcagagtcagctgctgcttgaggaagcagaacacacagctggaggcttggaacatgtgggtccctatgagtgtagagcccatatccccatagagtctacctagagcaggggtcgccaaatgttttcttaaagagcctgatagtgtatatgttaggctttgtgagccaggtatttacagcaactcaattctaccactgtggtatgaaaacagctatagacaatcataaatgaatgatcatggctatgttttaataaaactttacagacactgaacttgaacttccattgtgatatgaaaacagctatagacaatcataaatgaatgatcatggctatgttttaataaaactttatggacactgagcttgaacttcatatatcagtcatgtgacacaaaatatcattcttctttttatttgttttcacccatttgaaaaatgtaaaaactattcttagctgtacagaaacagatggtgggtcagatttgactcactgcccatagtttccagaccatgatgttcaggttcatggaagcacttcactctacactaatttattcatccattcatcacatatgtgatgagcacatacagacacacctcagagatattgcaggctccactccagatcaccacaataatgtgaatattgcaataaagcaagtcatacacatt

SEQ ID NO: 237 - DNA, 12887 bp, Homo sapiens
aacaactttcttattatctagcttcataattgcagtaaggaatagctttttttgcttgcagctgagatgactttttcaagggagaaaaagggatttctataacgaagagagggagagagagatgaagagggagggagtaagggagagagggaagaagggagaaagagagagagatttgaatatacattgcttcaaggatgcaaaaaattacaacctggaaaaggcttcgagtaactttaggaaaatgagctgctggactcctcagtcaatctgtcctttctagtcaatgaaaaagacagggtttgaggttccttccgaaacggggccggctaatttagcccctcccacgagcccaagggtctgttatatctctgtttccttgaggacctctctcacggagacggaccacagcaagcagaggctgggggggggaaagacgaggaaagaggaggaaaacaaaagctgctacttatggaagatacaaaggagtctaacgtgaagacattttgctccaagaatatcctagccatccttggcttctcctctatcatagctgtgatagctttgcttgctgtggggttgacccagaacaaagcattgccagaaaacgttaagtatgggattgtgctggatgcgggttcttctcacacaagtttatacatctataagtggccagcagaaaaggagaatgacacaggcgtggtgcatcaagtagaagaatgcagggttaaaggtcctggaatctcaaaatttgttcagaaagtaaatgaaataggcatttacctgactgattgcatggaaagagctagggaagtgattccaaggtcccagcaccaagagacacccgtttacctgggagccacggcaggcatgcggttgctcaggatggaaagtgaagagttggcagacagggttctggatgtggtggagaggagcctcagcaactacccctttgacttccagggtgccaggatcattactggccaagaggaaggtgcctatggctggattactatcaactatctgctgggcaaattcagtcagaaaacaaggtggttcagcatagtcccatatgaaaccaataatcaggaaacctttggagctttggaccttgggggagcctctacacaagtcacttttgtaccccaaaaccagactatcgagtccccagataatgctctgcaatttcgcctctatggcaaggactacaatgtctacacacatagcttcttgtgctatgggaaggatcaggcactctggcagaaactggccaaggacattcaggttgcaagtaatgaaattctcagggacccatgctttcatcctggatataagaaggtagtgaacgtaagtgacctttacaagaccccctgcaccaagagatttgagatgactcttccattccagcagtttgaaatccagggtattggaaactatcaacaatgccatcaaagcatcctggagctcttcaacaccagttactgcccttactcccagtgtgccttcaatgggattttcttgccaccactccagggggattttggggcattttcagctttttactttgtgatgaagtttttaaacttgacatcagagaaagtctctcaggaaaaggtgactgagatgatgaaaaagttctgtgctcagccttgggaggagataaaaacatcttacgctggagtaaaggagaagtacctgagtgaatactgcttttctggtacctacattctctccctccttctgcaaggctatcatttcacagctgattcctgggagcacatccatttcattggcaagatccagggcagcgacgccggctggactttgggctacatgctgaacctgaccaacatgatcccagctgagcaaccattgtccacacctctctcccactccacctatgtcttcctcatggttctattctccctggtccttttcacagtggccatcataggcttgcttatctttcacaagccttcatatttctggaaagatatggtatagcaaaagcagctgaaatatgctggctggagtgaggaaaaaaatcgtccagggagcattttcctccatcgcagtgttcaaggccatccttccctgtctgccagggccagtcttgacgagtgtgaagcttccttggcttttactgaagcctttcttttggaggtattcaatatcctttgcctcaaggacttcggcagatactgtctctttcatgagtttttcccagctacacctttctcctttgtactttgtgcttgtataggttttaaagacctgacacctttcataatctttgctttataaaagaacaatattgactttgtctagaagaactgagagtcttgagtcctgtgataggaggctgagctggctgaaagaagaatctcaggaactggttcagttgtactctttaagaacccctttctctctcctgtttgccatccattaagaaagccatatgatgcctttggagaaggcagacacacattccattcccagcctgctctgtgggtaggagaattttctacagtaggcaaatatgtgctaaagccaaagagttttataaggaaatatatgtgctcatgcagtcaatacagttctcaatcccacccaaagcaggtatgtcaataaatcacatattcctaggtgatacccaaatgctacagagtggaacactcagacctgagatttgcaaaaagcagatgtaaatatatgcattcaaacatcagggcttactatgaggtaggtggtatatacatgtcacaaataaaaatacagttacaactcagggtcacaaaaaatgcatcttccaatgcatatttttattatggtaaaatatacataaatataattcaccattttaacatttaattcatattaaatacgtacaaatcagtgacatttagtacattcacagtgttgtgccaccatcaccactatttagttccagaacatttgcatcatcaatacattgtctagagacaagactatcctgggtaggcagaaaccatagatcttttgtgtttacagctatggaaaccaactgtaccataaagatagttcactgagttttaaagccaagccacatcttatttttccaaggtttaatttagtgagagggcagcattagtgtggagtggcatgcttttgccctatcgtggaatttacacatcagaatgtgcaggatccaagtctgaaagtgttgccacccgtcacacaacatgggctttgtttgcttattccatgaagcagcagctatagaccttaccatggaaacatgaagagaccctgcacccctttccttaaggattgctgcaagagttacctgttgagcaggattgactggtgatgtttcattctgaccttgtcccaagctctccatctctagatctggggactgactgttgagctgatggggaaagaaaagctctcacacaaaccggaagccaaatgtcccctatctcttgaatgatcaagtcacttttgacaacatccaggtgaatataaaaacttaataaagctgtggaaaggaactcttaatcttcttttctgctacttaggttaaattcactagatcttgattaggaatcaaaattcgaattgggacatgttcaaattctttcttgtggtagttgcctatactgtcatcgctgctgttggttgagcatttgtggtgtaccacgctgtgtgctcaagggtattacattcatcttctcatttaatcctcacaacaatctgaagaaggtaggtattacaattcccacttcatagaaacagaaactgaggttcagagaggttaagtcatttgcccaaatggctgagccaaagcctaccatgtacctaacctttattttctttcccgaacataccaggctgtctcctcataacttccaagcatgcacttaaaactccacatgaatacaaggttcatgggacttggtattcatagaaagggaggcagaaagctggtctgttcctgataggcttgtaatttaatatcattctgttcatgtgctttggatggaagcacatctggcatatgatgctaatcagtggttcccatacccctggcttcctaattttaatgtttgctcacagcatagtagattgacatcaaatagtggccgatgatgatgaaaataaaggtcaaataagttgagccaataacagccgcttttttccttctgtctgcgtatacaaagcactgtcatgcacacaatctattctgaccctcacaacaacccataagggtgtaaatagtatttccattttacaaatgaggatcacacaaactactacatggcagagcagatactccaactcatgtcttctggttgaagcctattgctttttcttttctaaacactttccctcagcaagttggaattagacttcacaagtctccttcagagaacacaaatcttttcttattccattcctgtttggttgcctacgtccaatctccccctccccagagatgccaaaaaaaaaatcctttaaggtatttgggagccaaactcaacttgttaaaatctcaaattatggagacaatcagcagacacaacctaaccccaattattttggcaggaaggttggtttagaggcagatccagcaatctgctttgggccactctgggtggggtaggtgaaataagattggtcactgttaactaattttaatattggattggccattggttatcactgattaccattctcccctggattttcacccaggactcaaaacttggttctgctaaccctgttcctttatgaggaaccttttaaagattcctttataaggtgggagttttttttctatgaacctataggggagaaaaaagatcagcagaagtcattacttttttttttttttttttttttttttgagagagagtctcactccattgcccaggctggagtgcagtggtgctatctcggctcactgcaacctccgcctcctgggttcaagcaattctcctgcctcagcctcccgagtagctgggattgcaggtgcccaccaccacacccggctaatttttgtatttttagtaaagacagggtttcaccatgttggccaggctggtctccaactcccaatctcaggtgatcctattgcctcgggctcccaaagtgctgggattacaggagtgagccaccatgcctggccagaagtggttacttctgtagacaaaagaataatgctacttaatcaggctttctgtgtgacaagaaagagaaagaaaataaagaagtttcaattcatccaattcttaataagaaatatgtaaataaaattttttaaaattacacttcattttaatgttgtatcagtcaaggtccctgcaagagatggatggtatggtacactcaaactgggtaacacaggagagttttcagaaagcaactaaatccaaaatactatcaaggaatcaatataaaaattgttaatatttttctcatactaaattttcaaaatattttgtgtctattacatttacagcacatcttaattaggactagctgtgtgttcacctcacatgtggcttgtagctaccatactggacagcacatgtccaaaaaaatacacgtaaagttaaagtttaaaagacacaggaactaagccctcattgtctttcccttgggaggtagtttaaagagctatagatgctgtaacattcttgctattatttattatatatgacattattcctaaaaaagcttttgagatcctaggttgtattcctcaggttttgttgccttcccatgaagatgtgaaggcagggatgcctgttattcagtccaagatgcatgacaagagaccttgggaaagtttcatctggatttaaagattaattcttgatgcttacattccatactcaaaatgtaaatttgaatattaaaataaagatgattttttttttggagctagtcttgctctgttgcccaggctggaatgcagtggcatgatcatggctcactgcagcctcgacctcccaagctcaagcaaggctacaggtgtgcacctaagtagctaggactacaggtgtgcaccaccatgtctagctatttttttttctgtagagacagggttttcctatgttgtccaggctggtctcgaactcctgccctcaagcaatcctcctgccttggcctcccaaagtgttgagattacaggcgtaagccactgcacctggccaagatgaatattttaatagctcacagaacaaagtttgccacataatgataaaattactatgaaaatatattccctttattgtcagtttaaaagatgaactgagtttcacccaaactggtctggcccctctctgattcaaataccaatagttgctctgattcaaattccaactgttagaacatgacagctgctcataactagctttgcttactaaccatgtttctttccatttgtattaggtcctttactttttataacagcctcaaagtttcatgaattgctgcagtaaacattgattttcatgtttgtgagtctgcaagccagctgggcagctctacttcaggtggtaagggtggatcagacctattccatatacctcttgttctccttgtccagtggtttctagggatatgttctcatgatgaaccccgcagaggctcgtgaaagtgagaggaaactaggatgcctcttaaggtcttggtcaggatggggtctcctgtcacttctgtcacaggctattgtaagtcatatgagcaagctcaataaaatataaacaagtcagataaacagtgggaggaatggcaaagtcatatggccaaggccatgagtgattaattttaacacaggaaaaaagtaaagcattaaatgcgattatttaatatacaatgtcttattaactgaaatataaaatgtgtttactgtaaaatataatctgtttatctcaccaaagaaatattatctttaaaaaatgtcattacttctaagacatcatcagtctgcaacttctttccatagccttaatcaggatgctgtggcagctcccacattagcctcgcattctaaactggtagatgtcctaggaaaccatacatctatgtatttttcttattttatacgtttaggacaatgtatagctaattacccaactttttatttgcatacaaatctaatacaactgaacacaatcagttttatcacaggtataatggatttttcaatagtgaggaggtgcctccatgagccttctctttagaaaagtggcattcaagactcttcatttgaagtgaagattgctatgtcttttgcattgctctattttacataaattaagttataaattgacactataatcaactgacaccatgatcagtgatgatgatcaccctcatcagcactagagttgacttgtttttataacccctttgcatgtatgttgaatagcaaagttcatcagagaacatgtattagtcaatggtaagtaagatactctcatctaagaaataacatcacctcttctaatgaagttctaagaagagagggaagaaaaagtcttgggagctagtcagggaatagtgtgtatttgcaattacctaaactgaactctaccattactcctaacccagttcctcctcctgtgttttacatgattaatgccacccctgcctcaatgaaccaagatcagctccatcactgggacctccccattctgcctgtgcaatatttttcttttttatttctccttctaatattactgttattgctccagtaaagagctgtaatatattttacctggactgataccaggaatggtggtgttgcttccaatctgttgctgctagattaatctttgcaaagcacaggcttaatttcattgctgctcaactaaaaccactggtggctttccattgcctacaaaataaagtcaacctccccatcagacattcaaggctttcaatgatccatggccgccagctctctccaggctcatatcccactccactcctctgatgtttcctacactacactacactatactacactacagccaggtagaatgactgttcacccaacaccactcaggttgtcttctcaacttggaatactcttgcaccttcaaagctcatttcaaatgccccttcatttgtgaagccttctccaaatttccaagtcagaatgtctcttccttgtgctaccacaaccctttaactgagcctccattagtgcactgagaccattctgttcagtgtctgggtgaagcttcctggtgaaaaatatgttacctatttctttctgaaaagttggattcagggatattatcacggacctaaggtaatagttctagccaacctccctgtccactgccaggccgactacaaacccttctgttgctggcgagctggtccgcaccactagttctgcttcactctatttatctcttgatgtaaccatcttctttctccaggttttaagaaccagcccaactcctggttccctgatgaagcttttattcccctagccacatggaacttttcctttttggaacatgcctttagtttctgtgtagtttgccatgcagcacttcattgtacacattattaaaacagaattttaaggattagaatgaaccttaaaagatcatgcatctcaaaatttaatgtacatacaaattacccagggattttgttgaaataaaaattatttaattttaattaatataaataattcagtaggtctggggtgaggcctgaggttttacatttccaacaagctgccaggtaaagccaatacatctgtccaggaatcacactttgcgtatcaaaggtctagatgacattatcattccaaagagtttcttttacaggctctcagatcagtgttcatccactacctgactactgtcattcacaggcattctgttccacagcaggccagctaacgtggtatttacaaagctcactcctcttatacaacaatccaagtgtttcttttgtcagttgtctgtgccccaggagatccctctctgccttgccttgccctctgcctttggagaccagcacctcatactcagtgaaggcctggagtgcttaagagggatttcttccagctctcttgccctggtcttcagtgtattagatgtattacctccatgctctcagtagaggcccataggaaagagtaggtaggttatgccagctcacacgcatcctttaaaaatggtttagaagtttagctggtttcttattactcctgtctatggatgtttccttctgtcactctactagggatgaaacagctaatcatgttcaatagttacatttagattggtttttaaaaactatgattgtattagttcgtttccatgctgctgataaagacatatctgagactggaaacaaaaagggtttaattggacttacagttccacatggctggggaggcctcaaaatcaggtgggaggcaaaaggtacttcttacgtggtggcatcaagagcaaaatgaggaagaagcaaaagcagaaactcttcataaacccaccagatcttgtgggacttattatcacgagaatagcacagaaaagactggcctccatgattcaattacctcccactgcgtccctcccacaacatgtgggaattctgggagatacaattcaagttgagatttgggtggggacacagccaaaccatatcattcctccctgggctcctccaaatttcataatcctcacatttcaaaaccaatcattccttcccaacagttccccaaagtcttaactcatttcagcattaacccaaaagtccacagtccaaagtctcatctgagacaaggcaagtcccttccacttacaagcctgtaaaagcaagctagttacctcctagatacaatggggggtacaggtattgggtaaatacagctgttccaaatgagagaaattggccaaaacaaaggggttacagggtccatgcaagtctgaaatccagtggggcagtcaaattttaaagctccataatgatctcctttgactccatgtctcacattcaggtcatgctgatgcaagagataggttcccatggtcttgtgcagctccgcccctgtggctttgcagagtacagcctccctcctggctgctttctcaggctgatgttgagtgtctgtagcttttccaggcacaagatgcaagttggtggttgatctaccattctggggtctaccattctggggtctaccgttctgggactgtggccttcttctcacagctccactaggcagtgccccaacagggactctgtgtgggggctctgccccacatttcccttccacactgccctaggagaggttccccatgagggctctgcccctgcagcaaacttttgcctggacatccaggtgtttccatatatattctgaaatctaggcagaggttcccaaatctcaattcttgacatctctgcacccacaggctcaacatcacatggaagctgccaatgcttggggcctctaccctctgaagccacagcccaagctctatgttggctcctttcagccatggctggagcagctgggacacagggcaccaagtccctaggctgcacacagcacagagaccctgggcccagcccacaaaaccactttttcctcctgggcctctgggcctgtgatgggaggggctgccatgaaggtctctgacatgacctggagacattttccccatggtcttggggattaacattaggctccttgctgcttatgcaaatttctgcagccagcttgaatttctccttaaaaaaaatgggtttttcttttctactgcatcatcaggctgcagattttccacatttatgctcttgtttcccttttaaaacagaatgtttttaacagcacccaagtcaccttttgaatgctttgctgcttagaaatttattccaccagataccctaagtcatctctctcaagctctaagttccacaaatctctagggcaagggtgaaatgctgccagtctccttgctaaaacataacaagggtcacctttacttcagttcccaacaaggtcttcatctccatctgagaccacctcagcctggaccttattgttcatatcactatcagtatttttgtcaatgccattcacagtctctaggaggttccaaactttcctacattttcctatcttcttctgagccctccagattatttcaacacccagttccaaagttgcttccacattttcgggtatcttttcagcaatgccccactctactggtactattagtccattttcatgctgctgataaagacatacctgagactgggaacaaaaagaggtttaattggacttatagttccacctggctggggaggcctcagaatcatggcaggaggtgaaaggcatttcttacacggcagcagcaagagaaaaatgaagaagcagcaaaagcagaaacccctgataaaaccatcagatctcgtgagacttattcactatcacaagaatagcatgggaaagaccagcccccttgattcaattacctccccctgggtcctgtgggaattctggaaggtacaattcaagttgagatttgggtggggacacagccaaaccatatcaatgattttgtactttaaccagctgaatggaagtacaatctcttgctatatgacacaataattatttgcaaaatgagtaaacatatcataaggaaattatttttacaaggtttgaaacctgaaatgcagtctattatcatacataactaaaaatagagcctcaataaacagattcccagttttgaaaatgcaacatttgtactccacattgtcagttttcttaggtatatttataaatactcctataaaaatgtaaagaaacacataatgtagattgctaattttataataacacaagttgattttgacatccaacttattaattatgaaatgacttttggcctagtaacaatgaaaatgggggcaaatacagataaatggtaattcttagaatgaactactcagcaccaattctaagtttttcttgatggtaaatcataatgttccctttctcctcggttctgcaatctataggcataccataattgtaatcaatagcttaaaaatatgtctctctgtcctattctgtatctgtatctcttggatttttacctttgcaatagtcaactgaaccatcttcttggagtactcatgaagatggaagtctacatggagaatacaggatgaatccactctgtctcctgcagtgaagtctgtttgaaggatgtatttggctgtcttctggacaggccattctaataacagaaacaaacaagttattttaaaacttattggaatattcaaatattaaccaaagtagaaaaatataatacacatccatgtgcccatcacagaacttcactgattatcatcatttagccagtcttgaagaagcaagtgctaattacaatcacaaatgaaacaagattcagacttcatgaagagcactgcgctataataaaagaagaaatgagcacatacattcttttactgacagtcaaatggtgaaggtgggcagaatcattatgtgatgcaacatggcaaaagtatacagacagtgcatccagaggaaggcaccttgctgaatgactagaatggaagtaggagacattttgcaggcccccttcatcctgcagggagaaccagaaccacagcagctctatttgcctattcctctttaaattacaaagttaaaatttgggagtagtagaaaatcaattggttatcttatagagtctcctagaatatttcattggcattgagaaggtggaaaatgcaaattatatactttaaaatgtaatttttgcttttcacatatgcttaaagcctaaaacctcttaataaacttcttctgaaatata

SEQ ID NO: 238 - DNA, 1998 bp, Homo sapiens
gcgcgcgcgttttccttgttcctggtcaacaaagaaatgtggagtgtcttggctgaatcctcatacagacaagatcattatggtgctgttaggtaggacttgtatccagatgtaaggttgaaaaagtgatataataaaggaaccaaggagaaaattcagaaggaaagaaaaaattgcctctgcaggtgtgcgagcaggattgcttctgcaacaaaagcctccacccagccacatcttgggaaaagaatggccacttcttggggcacagtctttttcatgctggtggtatcctgtgtttgcagcgctgtctcccacaggaaccagcagacttggtttgagggtatcttcctgtcttccatgtgccccatcaatgtcagcgccagcaccttgtatggaattatgtttgatgcagggagcactggaactcgaattcatgtttacacctttgtgcagaaaatgccaggacagcttccaattctagaaggggaagtttttgattctgtgaagccaggactttctgcttttgtagatcaacctaagcagggtgctgagaccgttcaagggctcttagaggtggccaaagactcaatcccccgaagtcactggaaaaagaccccagtggtcctaaaggcaacagcaggactacgcttactgccagaacacaaagccaaggctctgctctttgaggtaaaggagatcttcaggaagtcacctttcctggtaccaaagggcagtgttagcatcatggatggatccgacgaaggcatattagcttgggttactgtgaattttctgacaggtcagctgcatggccacagacaggagactgtggggaccttggacctagggggagcctccacccaaatcacgttcctgccccagtttgagaaaactctggaacaaactcctaggggctacctcacttcctttgagatgtttaacagcacttataagctctatacacatagttacttgggatttggattgaaagctgcaagactagcaaccctgggagccctggagacagaagggactgatgggcacactttccggagtgcctgtttaccgagatggttggaagcagagtggatctttgggggtgtgaaataccagtatggtggcaaccaagaaggggaggtgggctttgagccctgctatgccgaagtgctgagggtggtacgaggaaaacttcaccagccagaggaggtccagagaggttccttctatgctttctcttactattatgaccgagctgttgacacagacatgattgattatgaaaaggggggtattttaaaagttgaagattttgaaagaaaagccagggaagtgtgtgataacttggaaaacttcacctcaggcagtcctttcctgtgcatggatctcagctacatcacagccctgttaaaggatggctttggctttgcagacagcacagtcttacagctcacaaagaaagtgaacaacatagagacgggctgggccttgggggccacctttcacctgttgcagtctctgggcatctcccattgaggccacgtacttccttggagacctgcatttgccaacacctttttaaggggaggagagagcacttagtttctgaactagtctgggacatcctggacttgagcctagagatttaggtttaattaattttacacatctaatgtgaactgctgcctaaccactcaagagtacacagctggcaccagagcatcacagagagccctgtgagccaaaaagtatagttttggaacttaaccttggagtgagagcccagggacaggtccctggaaaccaaagaaaaatcgcatttcaaccctttgagtgcctcattccactgaatatttaaattttcctcttaaatggtaaactgacttattgcaatcccaagacccatcaatatcagtatttttttcctccctatacagtgccctgcccacccttatctgcacccacctcccctgaaaaagagagaaaaaaaaaaaaaaaaaa

SEQ ID NO: 239 - DNA, 2977 bp, Homo sapiens
agtgggggcgctcgcctttcctgcctcactcgcagctgccgggtgttggggaaagagtcgcctgcctccggaccggagtgcagacctctgaccctggagtcgctcggccgctgggaaccgtccccttgggtcgtcgcctgggccgcccgtcgttccccggccccgaggggtccggctggccgcggtgtgggtagaggtcagcatgagccaaggggtccgccgggcaggcgctgggcagggggtagcggccgcggtgcagctgctggtcaccctgagcttcctgcggagcgtcgtcgaggcgcaggtcactggagttctggatgattgcttgtgtgatattgacagcatcgataacttcaatacctacaaaatcttccccaaaataaaaaaattgcaagagagagactattttcgttattacaaggttaatctgaagcgaccttgtcctttctgggcagaagatggccactgttcaataaaagactgtcatgtggagccctgtccagagagtaaaattccggttggaataaaagctgggcattctaataagtacttgaaaatggcaaacaataccaaagaattagaagtttgtgagcaagctaataaactgggagcaattaacagcacattaagtaatcaaagcaaagaagctttcattgactgggcaagatatgatgattcacgggatcacttttgtgaacttgatgatgagagatctccagctgctcagtatgtagacctattgctgaacccagagcgttacactggctataaagggacctctgcatggagagtgtggaacagcatctatgaagagaactgtttcaagcctcgatctgtttatcgtcctttaaatcctctggcgcctagccgaggcgaagatgatggagaatcattctacacatggctagaaggtttgtgtctggagaaaagagtcttctataagcttatatcgggacttcatgctagcatcaatttacatctatgcgcaaattatcttttggaagaaacctggggtaagcccagttggggacctaatattaaagaattcaaacaccgctttgaccctgtggaaaccaagggagaaggtccaagaaggctcaagaatctttactttttatacttgattgagcttcgagctttgtcaaaggtggctccatattttgagcgctcaattgtcgatctttacactggaaatgcagaagaagatgctgacacaaaaactcttctactgaatatctttcaagatacaaagtcctttcccatgcactttgatgagaaatccatgtttgcaggtgacaaaaaaggggccaagtcactaaaggaggaattccgattacatttcaagaatatctcccgtataatggactgtgttggatgtgacaaatgcagattatggggaaaattacagactcagggtttaggaactgccctgaagatattattctctgaaaaagaaatccaaaagcttccagagaatagtccatctaaaggcttccaactcacccgacaggaaatagttgctcttttaaatgcttttggaaggctttctacaagtataagagacttacagaattttaaagtcttattacaacacagtaggtaataaaggcttttatgtgtctaactagagacataaagtgactgtggaaagccttttaattatggacattcatcagaaagacactaatctgacttcaagaattctgaactattaaatagaaaatttaaatgctcacttgaatatttatgattcttaatagattattatcaactagagatatttataaatgaagtatatacttttaaaacatgtaagttatactaattttgtgtttaatttcatatgttttcatgtaatgaaaattctattttttttagaattggttttgtttttattctattatcctttatttccagttgtcaaactttaaatggctatgtctgcattctaataacactgttcagtctgttatggaaaaggagaactagggaacaaatgttgctcagggctggtgtcagtgagaaaaatttatcaatgctttttaatgtgtttttacccttgcctcactgtgtgtgtgtcactttctataatataaagaaatactataatatttctagaatctggaactgtcaccatgatgaatggccctttcaatgcatagttacagaaattcctgaagattccccaggacttcaatttcattggtttttatttgcagtttttagttgctgtaattgttgctgtttccagtctaaaggacctcctttggtaaaggtgaacaagacctctcccctatgctacccagccagattttgtgtgtgtaatgggctggcccaagagtgttcttttacttagaactccttttgattttgcttttctctgcccctagaaattttagggacaaagacattttggaaattgtcagttacttttagaaagaaaacactgcagaaatatttaacagattacttcttgataaaatttaaatgggattatatgaatttataatgccaattgaaaatattatatacacaaaatttgctattttcacttaaagtaagcatttttaaaggatttattttagaatacaatctatgcaatcctcgaactcagtgtgcttttccctgacaggatatataaaaaggtagattaggtcaaccctcctttaagcttactctcccctcaccttttcttttcactgtatataaacggtactttctgtgattcataccaacagaggactttctgtgattcataccaacagtcctaaactgtcattttctaaatctgggatttaaaatctttagacaatatttaaaatcttgattttttttaaatgtcagcagatacaatttggaagattgcatctgtgtagaagtaatgcaggtacaagatctagagtttttccttagactctttagtcttttctgaattaaagaataagtgctcttaaatccaaaaaaaaaaaaaaaa

SEQ ID NO: 240 - DNA, 7101 bp, Homo sapiens
ccagcgtcaggccagccccggcatgctctgcggccgcccgcggtccagctccgacaacaggaattttctccgagagcgggccgggctcagttcagctgctgtccagacccggatcggcaacagtgccgcctccagacgttctcctgccgctcgcccgcccgtcccagcgcccccagccctcccgcgagggcgccccgggacggaaggatccaccagtctgtcggcgcccgccgttctcgtggtcgccgtcgccgtcgtcgtggtggtagtctccgccgtcgcctgggccatggccaattacatccacgtccctcccggctccccggaggtgcccaagctgaacgtcaccgttcaggatcaggaggagcatcgctgccgggagggggccctgagcctcctgcaacacctgcggcctcactgggacccccaggaggtgaccctgcagctcttcacagatggaatcacaaataaacttattggctgttacgtgggaaacaccatggaggatgtagtcctggtgagaatttatggcaataagactgagttattagtcgatcgagatgaggaagtaaagagttttcgagtgttgcaggctcatgggtgtgcaccacaactctactgtaccttcaataatggactatgctatgaatttatacaaggagaagcactggatccaaagcatgtctgcaacccagccattttcaggctaatagctcgtcagcttgctaaaatccatgctattcatgcacacaatggctggatccccaaatctaatctttggctaaagatgggaaagtatttctctctcattcccacaggatttgcagatgaagacattaataaaaggttcctaagtgatatcccaagctctcagattctccaggaagagatgacttggatgaaggagattctttccaacctgggctcacctgttgtgctttgccataatgacctattgtgtaagaatataatctacaatgagaaacaaggtgatgtacagttcattgattatgaatattctggatacaactacctggcatatgatattggaaatcatttcaatgaatttgcaggtgtgagtgatgtagactatagtctgtatccagatagagaactacagagtcagtggctgcgtgcttaccttgaagcctacaaagaatttaagggctttgggactgaagttactgaaaaggaggtagaaatactcttcattcaagtcaatcagtttgcattggcttctcatttcttttggggattgtgggctttgattcaagccaaatactccactattgagtttgatttccttgggtatgcaattgttcgttttaaccagtactttaaaatgaagcctgaggttactgcattaaaagtgcctgagtaaagaagagatttaattattctccagtagctgagcaatgcttgtgaatcttttcttaagaaatcccaaaaagccaatattagttaaaattctgttgtttaatttggttatcttgctttataaattatgcctctaaacaatcaaatctatttttgaaatagactgaatgatgtcaagaaatatacctactgctatccgtatgtggtggattagaaatgtgttaaatctgcaaaaggtataaagatgtcagtttaatttctttgataatttaacctatgttgtatgtgaattatttattataaacttagcacgattctgtgactgtttttctctgtttcacgttcgttgagtgtaagcaatgaaaatgtcccaaataagttttttaagttttactttaataagattaatttcagtaaacattctagttgttcagtgtaacctttttatcttgatgcattgtaagtaaaatgaatcatttactcttgaaatgccagtcattgactgatgtagataatttaggattttcatataaaaatagctgtttaggaaggtgaaatacattcactgtctctgttggtggtacatcttgttgaattcaatattagaaagtatttctttttggggtaatataacttagaattaaatccctgtttctctatgtagtctggcagtataaatataaatatttaccatataatcttggaataagtattagttaatgttaccaaaatctgtattaaataatgttttcaaatgctaaatatggtcgttactattttcagttttaaaaattttatagtatcaaattgtttctaaccaaaaatttccttttacttctagagatgctttatgtttttgattattaaatagtcactagtattgctaatttttgaaacaaatacacaaaatttatcatatgtagaaataagaaaatattgtttaggttaattattttttacctatccagagtcattccttacatttcagtttcatgtttcattcctcacattttagtttcatgttttagtttgattctatgtttttagactgatagcaaatgattacttgatacatgtaagttcagcgttatatgttgaggcagttatataattaaataaggaacacttagggcattgatcttgtacacttaaaatctgacaaatgacaaaatgtgaattaagcataaatagtcatggcaggagggcttttgtttatttctcttgtttttgtttaactgtatttttaattttgtctggtggtaagagggaggtaattattgtatggaaagaagttagatctttcagatagataaataggcttcaggttttgaagtctgctctgtgtagttgagcagtcatggttaactttacttagaaaattagtctgacaagctttgcacttcggtcacataagtgcccatgtacaaagttggcttactggatctgcatattcaaaatatgcaactacaaatttatcctctgagaaatcttctgaggagtctaatgtattccaaatgacttaatattctcagacaaatgctttaaaatacttggattatctcaagatttttgaagctaataaagtaaatagaaacacaggccattttaaatggtaaattctagttacataaatataatcttaaagtatgtttgtatctgtaacagtgttagaccagatttggtttctacctccccaatgttataaatgttcacttttgtttttataaaccatattactgtaagatcaatagaactttgcctagttaagtgaatggaaccaattaaacaactagtagctttttataatgttagtgtgaacttgaaaaattgtttttggtggaatttttgtctgtggttagaacattttcataaaacagataaagaatgtgtaatactcttaattttttttttttttttttttttttttttgctttctgccttctaaagtgcaacagtatatatcttgtagaactgtgggaggagagaagataatttttctaccttactccatattcttacttcaaactattttgaatagaggttcactgagccattgctgatagactgtgcatagctactagctgtcacactattgtaggttttttggagagattcatagggaagtgaatgtaaccaggaataaaggctctcactttagctctgggactatgcagtggatcttgggaacaaaataagatatctaatctattttccccattctggctagattttggttgttgtgatgctcctacttcctgtataggtttttgggatcatggtgcaggctagtaataggattcagaattgcttcccttttatatcgaccatgtaagggattctaaaggagggtaaatctcaaagtgctctgaaatcatccctctaaaatctgtcctgtggtgtgctaagatgtctgttgcctttttatgttaagctaaggaacttgaatgccttacctaataactcaactagtagtaagctcattttgtaaatatgaaaatggctgtaagaagtggcattcatgtatattcaatgttagtcaatagaccatagtggcctggatgctttaacaagccaaattccgcaattttttttccttttttccccttcatacttgtatgatctcacctgaccagtgatttcttttcctcctaaccccatgctaccaccattttctggaaatcaaagagatgtggtagtaaatcatacagtacacacgatcatctgagatcaatatgagcacaaaactcatcaagtaggtctgcctggaatgtatataaaaaatgtaaataaaaatttgtaaattagtgtgaactgtatcttgcatatgagactgtgtattgttttgcattctcttcccttttgtagaaatttttctgtaaggaaatgattcagcttgttggttttagagtaaaaatagccaacagttgtggctacacagtgagatcacaggaactggaaatagggtttgtcggctttggttaatgtcagtactcatttatttagcctctcagtgcttaataagacttttctttattttttagttagccgttaggttttgtgaggttagattcctggaagcagtgaatttatacactgttatattaatagagctccgttctttgagtcatgattccaagctaaaggaaattaaaaatgtaatttaataatttcctatttttagggttgttaatttttttctacaaaaaaaccttgaaattttagatatcccaatgtgaatctaatttccatatatacagaaattagacaaataataagtctttagttcaacttaagcatatctcaaatgacttctctaaatttaaagttgatcatgataggatcataaaagacagaaaagacttaagtaatcttgtaatgacaattatttccatttttgctgaactaaaaatatttaacttcataaatatgttactacagcttccagatttaaagaaaaaaagtttcccccactctcaattaaaagttagaaccctccacttttaaaattatacaaatatttcttttttacattacacagaagccttctgtaccattttacgaatttctgtcttcataatataagtgaaaatactgtcatttcaattttctgctttaaattgtttttaataagcattccaaagtgatacagacttaagcttttaatcaatcagtcattcagttgatagacaaagttagcgatgctttatgctaggaaacttgttgacagtaacctgtgcgactttatgcagaagacaaatgctagtaattattatgcacagaggaaaaatcattttaagtatgtggtaaagcagcttcatctttcaaaattgatttgctctggtttttctttagtccattagattccagaatgtccttttactgggaatttagttatgtattaagataacctgttttcagttctttttgaaaagaagacattatttatattgaaccaccttattttaaaatttttaacttttatataccacttgtgtgattccagtgtcatgtcttgggtttgatgtcgttggacagaaaagtgtatcaattattttaaatgaatttttccccatgtttgaggcttagtctgtaaatgtgttgctgtaacagaaaatacttgggtatgcattacttgaatacttgaaaactgaaattaataagatgtattacataatgaattagatttctctgaacagtttttacactgaaaatcttcatttctggattgcagtttgaaatggaatgaagacctgaattatttgggtagaaaaaattatgatagtgcttataagaactgtaaactgttttaaactattttgtgtttgacgcatcaaacttcaagttttttgtaagtttctctcctgaaattttctttctcttctatactttatgcacttactatactactgatgtaataaaagagcagggttaaaaatattgtatctgtattcattgtgaatcctgtagcttttctagttaacaaaaaatcgctttctaaaatactcttaatcccattgttttggttaacatcttacccatttgttgtatttcaaatgccattaatcattttagtacaacacctatgtttataaaaatttgaaaacattacatattgtatttaaaactaattagtgaagagtaagaaaaaaactagccaacagaattgtaggtgatgcattagttaaatttcaaaactcataataaaggaactttcagagattggttgaaacccagtggtatccctgtaaattagctcctgtgactggaaaagaccccaaaaaggcagtagaggagattagtgtttacttgctgtggttgtggtgtgctgctacttaattataggtagtgacacactgaaattcttatttgtccaataatctgaagtagtttcctatatttatctgtactaaattgactataaattgagtctgcaaagaggaaactttttgactgtactgtatttaggagcctttgtacagcttggtcaaatttccatgatatgaagtatttgagttttaaaatatactgttattaaaaggaaaaagacatggccattattccatgtgcttaaatgataatttccttattcagtttcagaagaaaaagaatgaaattgggtaactgtcattgcgttagctttatgttgaattgggaaattgtggcataaagcttaaattcgtgtttatcaaatgtgaaccatagtagtataatgctgctttgtatataatgtaagtgctacaaatagtctcagcactgaaaatgtattgatacctcttaaatgaatgcaacttttgatgtaggtgttttgctatgcctcagaaaatatctgtctgagaatttgttaatctgtttgataatgaagatacttcctgttttcttgtttcatattttcatgttcaaaatttaagttttacatttttactactgttaatttaaataaaatttgttctgtggataaaatgaggttggcagtgaagaaaattaaaaacagcctcattcatgtaactggttaagtaaaaatacattttcactatgtgttcataaacttttaatgaagctgtttgtctttcagttcaaatataagtgatgtttaggctttatttctgttaataaggctttttaccattgattaaatgaaggaatgtatctttttgaagagatttatattctgtaaataaaaattcgttgtaacaataaagttgagttctaactacagtgtattca

SEQ ID NO: 241 - DNA, 1154 bp, Homo sapiens
acaggcacaggtgaggaactcaactcaaactcctctctctgggaaaacgcggtgcttgctcctcccggagtggccttggcagggtgttggagccctcggtctgccccgtccggtctctggggccaaggctgggtttccctcatgtatggcaagagctctactcgtgcggtgcttcttctccttggcatacagctcacagctctttggcctatagcagctgtggaaatttatacctcccgggtgctggaggctgttaatgggacagatgctcggttaaaatgcactttctccagctttgcccctgtgggtgatgctctaacagtgacctggaattttcgtcctctagacgggggacctgagcagtttgtattctactaccacatagatcccttccaacccatgagtgggcggtttaaggaccgggtgtcttgggatgggaatcctgagcggtacgatgcctccatccttctctggaaactgcagttcgacgacaatgggacatacacctgccaggtgaagaacccacctgatgttgatggggtgataggggagatccggctcagcgtcgtgcacactgtacgcttctctgagatccacttcctggctctggccattggctctgcctgtgcactgatgatcataatagtaattgtagtggtcctcttccagcattaccggaaaaagcgatgggccgaaagagctcataaagtggtggagataaaatcaaaagaagaggaaaggctcaaccaagagaaaaaggtctctgtttatttagaagacacagactaacaattttagatggtaaggttcacaaataggttgatttctttcttcagctttctgacatgtccagcccatctctaatgaggactcccagatcatcactttatggctgttaggtgtttcccatatgaaattagaggagctgggtcagggagacaaaagtcttctattagtcttatggatagctcctccttgagtgtattttgtgcaaaagattaagaagctggactctactgccattaaagctgagagaatcctaaggttatttgtggcttcggggttatatttattactactactactaataaatattcaacaagtaaataaatcttttttaaatcaaaaaaaaaaaaaaaaaaaaaaaaaaaaaa

SEQ ID NO: 242 - DNA, 3592 bp, Homo sapiens
ggcggggggcgcacagagccagaggggcttgcgagcggcggctgagggaccgcggggagggggcgccgagcggctccagcgcagagactctcactgcacgccggaggccccttcctcgctccgcccgcgcgaccgcgcgccccagtcccgccccgccccgctaaccgccccagacacagcgctcgccgagggtcgcttggaccctgatcttacccgtgggcaccctgcgctctgcctgccgcgaagaccggctccccgacccgcagaagtcaggagagagggtgaagcggagcagcccgaggcggggcagcctcccggagcagcgccgcgcagagcccgggacaatggggccgcggcggctgctgctggtggccgcctgcttcagtctgtgcggcccgctgttgtctgcccgcacccgggcccgcaggccagaatcaaaagcaacaaatgccaccttagatccccggtcatttcttctcaggaaccccaatgataaatatgaaccattttgggaggatgaggagaaaaatgaaagtgggttaactgaatacagattagtctccatcaataaaagcagtcctcttcaaaaacaacttcctgcattcatctcagaagatgcctccggatatttgaccagctcctggctgacactctttgtcccatctgtgtacaccggagtgtttgtagtcagcctcccactaaacatcatggccatcgttgtgttcatcctgaaaatgaaggtcaagaagccggcggtggtgtacatgctgcacctggccacggcagatgtgctgtttgtgtctgtgctcccctttaagatcagctattacttttccggcagtgattggcagtttgggtctgaattgtgtcgcttcgtcactgcagcattttactgtaacatgtacgcctctatcttgctcatgacagtcataagcattgaccggtttctggctgtggtgtatcccatgcagtccctctcctggcgtactctgggaagggcttccttcacttgtctggccatctgggctttggccatcgcaggggtagtgcctctcgtcctcaaggagcaaaccatccaggtgcccgggctcaacatcactacctgtcatgatgtgctcaatgaaaccctgctcgaaggctactatgcctactacttctcagccttctctgctgtcttcttttttgtgccgctgatcatttccacggtctgttatgtgtctatcattcgatgtcttagctcttccgcagttgccaaccgcagcaagaagtcccgggctttgttcctgtcagctgctgttttctgcatcttcatcatttgcttcggacccacaaacgtcctcctgattgcgcattactcattcctttctcacacttccaccacagaggctgcctactttgcctacctcctctgtgtctgtgtcagcagcataagctcgtgcatcgaccccctaatttactattacgcttcctctgagtgccagaggtacgtctacagtatcttatgctgcaaagaaagttccgatcccagcagttataacagcagtgggcagttgatggcaagtaaaatggatacctgctctagtaacctgaataacagcatatacaaaaagctgttaacttaggaaaagggactgctgggaggttaaaaagaaaagtttataaaagtgaataacctgaggattctattagtccccacccaaactttattgattcacctcctaaaacaacagatgtacgacttgcatacctgctttttatgggagctgtcaagcatgtatttttgtcaattaccagaaagataacaggacgagatgacggtgttattccaagggaatattgccaatgctacagtaataaatgaatgtcacttctggatatagctaggtgacatatacatacttacatgtgtgtatatgtagatgtatgcacacacatatattatttgcagtgcagtatagaataggcactttaaaacactctttccccgcaccccagcaattatgaaaataatctctgattccctgatttaatatgcaaagtctaggttggtagagtttagccctgaacatttcatggtgttcatcaacagtgagagactccatagtttgggcttgtaccacttttgcaaataagtgtattttgaaattgtttgacggcaaggtttaagttattaagaggtaagacttagtactatctgtgcgtagaagttctagtgttttcaattttaaacatatccaagtttgaattcctaaaattatggaaacagatgaaaagcctctgttttgatatgggtagtattttttacattttacacactgtacacataagccaaaactgagcataagtcctctagtgaatgtaggctggctttcagagtaggctattcctgagagctgcatgtgtccgcccccgatggaggactccaggcagcagacacatgccagggccatgtcagacacagattggccagaaaccttcctgctgagcctcacagcagtgagactggggccactacatttgctccatcctcctgggattggctgtgaactgatcatgtttatgagaaactggcaaagcagaatgtgatatcctaggaggtaatgaccatgaaagacttctctacccatcttaaaaacaacgaaagaaggcatggacttctggatgcccatccactgggtgtaaacacatctagtagttgttctgaaatgtcagttctgatatggaagcacccattatgcgctgtggccactccaataggtgctgagtgtacagagtggaataagacagagacctgccctcaagagcaaagtagatcatgcatagagtgtgatgtatgtgtaataaatatgtttcacacaaacaaggcctgtcagctaaagaagtttgaacatttgggttactatttcttgtggttataacttaatgaaaacaatgcagtacaggacatatattttttaaaataagtctgatttaattgggcactatttatttacaaatgttttgctcaatagattgctcaaatcaggttttcttttaagaatcaatcatgtcagtctgcttagaaataacagaagaaaatagaattgacattgaaatctaggaaaattattctataatttccatttacttaagacttaatgagactttaaaagcattttttaacctcctaagtatcaagtatagaaaatcttcatggaattcacaaagtaatttggaaattaggttgaaacatatctcttatcttacgaaaaaatggtagcattttaaacaaaatagaaagttgcaaggcaaatgtttatttaaaagagcaggccaggcgcggtggctcacgcctgtaatcccagcactttgggaggctgaggcgggtggatcacgaggtcaggagatcgagaccatcctggctaacacggtgaaacccgtctctactaaaaatgcaaaaaaaattagccgggcgtggtggcaggcacctgtagtcccagctactcgggaggctgaggcaggagactggcgtgaacccaggaggcggaccttgtagtgagccgagatcgcgccactgtgctccagcctgggcaacagagcaagactccatctc

SEQ ID NO: 243 - DNA, 4213 bp, Homo sapiens
tccactcctggagcccgcggaccccgagcacgcgcctgacagcccctgctggcccggcgcgcggcgtcgccaggccagctatggcccccgacccggtggccgccgagaccgcggctcagggacctaccccgcgctacttcacctgggacgaggtggcccagcgctcagggtgcgaggagcggtggctagtgatcgaccgtaaggtgtacaacatcagcgagttcacccgccggcatccagggggctcccgggtcatcagccactacgccgggcaggatgccacggatccctttgtggccttccacatcaacaagggccttgtgaagaagtatatgaactctctcctgattggagaactgtctccagagcagcccagctttgagcccaccaagaataaagagctgacagatgagttccgggagctgcgggccacagtggagcggatggggctcatgaaggccaaccatgtcttcttcctgctgtacctgctgcacatcttgctgctggatggtgcagcctggctcaccctttgggtctttgggacgtcctttttgcccttcctcctctgtgcggtgctgctcagtgcagttcaggcccaggctggctggctgcagcatgactttgggcacctgtcggtcttcagcacctcaaagtggaaccatctgctacatcattttgtgattggccacctgaagggggcccccgccagttggtggaaccacatgcacttccagcaccatgccaagcccaactgcttccgcaaagacccagacatcaacatgcatcccttcttctttgccttggggaagatcctctctgtggagcttgggaaacagaagaaaaaatatatgccgtacaaccaccagcacaaatacttcttcctaattgggcccccagccttgctgcctctctacttccagtggtatattttctattttgttatccagcgaaagaagtgggtggacttggcctggatgattaccttctacgtccgcttcttcctcacttatgtgccactattggggctgaaagccttcctgggccttttcttcatagtcaggttcctggaaagcaactggtttgtgtgggtgacacagatgaaccatattcccatgcacattgatcatgaccggaacatggactgggtttccacccagctccaggccacatgcaatgtccacaagtctgccttcaatgactggttcagtggacacctcaacttccagattgagcaccatctttttcccacgatgcctcgacacaattaccacaaagtggctcccctggtgcagtccttgtgtgccaagcatggcatagagtaccagtccaagcccctgctgtcagccttcgccgacatcatccactcactaaaggagtcagggcagctctggctagatgcctatcttcaccaataacaacagccaccctgcccagtctggaagaagaggaggaagactctggagccaaggcagaggggagcttgagggacaatgccactatagtttaatactcagagggggttgggtttggggacataaagcctctgactcaaactcctcccttttatcttctagccacagttctaagacccaaagtggggggtggacacagaagtccctaggagggaaggagctgttggggcaggggtgtaaattatttcctttttctagtttggcacatgcaggtagttggtgaacagagagaaccaggagggtaacagaagaggagggacctactgaacccagagtcaggaagagatttaacactaaaattccactcatgccgggcgtggtggcacgcgcctgtaatcccagctacccaggaggctgaggcaggagaatcgcttgaaccggggaggtggaggttgcagtgagctgagatcacgccattgtactccagcctgggcgacagagcaagactccatttcaaaaaaaaaaaaaaaatccactcatataaaaggtgagctcagctcactggtccatttctcagtggcttctccatcctcatttgcaaacctcagagggataaggcagttgaacctgatgagcaagaattataacagcaaggaaacattaatgcttagaattctgagatccagcacaactcagtctgtgggagctcagctcgctgcccagggataggtatgacctatgtctgccttaggctgctgggagatgccattctccagtttcagaagcaggcagggcaaaggtcaagactgtggtattggggtcttttggctctgaaggatcctggaaccactgattttggtttattccctccagggtctaaagagaacaagaggtgctagctcttaccaaaacagatggtagagagagttgctggctatttaaaaagctctttcatcttttaattcacctcttcttttcacctctttaaccactcctcaggaacagaacacttctaggactgggggtcttttagctccataagcaagtgagcagatgggacaagttagtcttttctccctagaaacaaaggggatgcccagtggtttccctttgcttcccaacctaaaatttcaagtttaataaaatagcaattagcagaagtgaccaaattgggagataattatcagtcatgaggaaagacacagatttcggtcataaagaatgtaagggctataagtagaaactttctataacctaaatgatgttatagaattatttttgagcaggagcagaaagattaaatatgatcacttcatacttctaaatcagaaataggaagattaaaaccacagaacagtttgtgatttctattgctgtagctaggtatcttactctgtccactcttgttcaagtatctaactcttctggaaaccaaataggctttagaagagattatcctatattcctatcagtataatactaaaatgtaactttttaatcatctggtttttaaaagataaacagtttagcccatctctccagagagcaaacataggaatatgactcaggagcctcctagggcttatcatcagccctcacacccgcttccccctccaacccacagcctttgcttccaggtggcaggattactactttgcctcttcagcagcatctactctaggcatattgatcattttagacactgggagaagagaacctcaaactaggaggaaaagacagagcctccacttagttttgggaggggatggcagacagtcaaggagatgagcgtcctaaggcatgttgggatagggtcagatgcaccacccatggagaggtttgtcaacacaaagacatggaaggttagaggtttgtcaacaaaaagacatggaaggttaggtttgtcaacacaaagacatggaagattagaggtttgtcaacacaaagacacaggaagaatgggctgcagaagatttagatgttttccatttgggcacattttacttagctggagaactaggtttaaaacagcctgggtaggaaaattagaagcaagctggatgcagtggctcatgcctgtaatcccaacacttttgggaggtccaggcaggaggatcacttgggcccaggaggtcaagcctgcagcgagctgagatcacaccactgcactccagcctggggtgatagaacaagaccctgtctcaaaaaaaaaaaaaaacaacaaaaacttagaattgaggagttgtacctccattggcttcctcactccaaaataggtgctgatccttcctattcctattctttgccaccttttgggtgtggtgtcaccagcctgtttagccaagtagctttgggcataggctgcccaatctgagcaaacaccagtgaggctctattgagccaagaccaagtcctcaaagcacctgaaccactgtggccttctcagcctacagcagtgtggtctcttacatggccacaaagggacacacagtgacaaaaggctcggaatgttacaatggtaaaatgagtgatctcaaatccactgacagatataaaataggcttagagaggaaaagctgcctctggtcaagtagatcatggcagcatgaattccaactcacttttttacaactccaacttctatgtttatctttgttactttcacttttttacaacctggccagaggcattttttaaatcaggcccaatatcagtattctttttgtgtgtgccaattttgttatcacatccctatgaagttgaaaaataaagttaattttgaccaaaaaaaaaaaaaaaag

SEQ ID NO: 244 - DNA, 5720 bp, Homo sapiens
gcggctcaggggcggggacgggggcgtggtcccgccgtataagaacggagggggcggcggcgggacggctcactcggtgccgctgcctaggggctgtagaggtcgcgccgctcctgctggggcctgcccacgccaaggacctgcctctgtcgcctcctcttctattgcccagtttccccagccagaacatcccctgaagatggcagaggagagcagctgtaccagggattgcatgtccttcagcgtgctcaactgggatcaggttagccggctgcatgaggtcctcactgaagttgtacctatccacggacgaggcaactttccaaccttggagataactctgaaggacatcgtccagaccgtccgcagtcggctggaggaggcaggcatcaaagtgcacgacgtccggctgaatggctccgcagctggccacgttttggtcaaagacaatggcttgggctgcaaagacctggacctaatcttccatgtggctcttccaacagaggcagaatttcagctggttagagatgtggttctgtgttcccttctgaacttcctgccagagggtgtgaacaagctcaaaatcagtccagtcactctgaaggaggcatatgtgcagaagctagtgaaggtttgcacggacactgaccgctggagcctgatctccctctccaacaagaacgggaagaacgtggagctgaagtttgtcgactccattcggcgtcagtttgagttcagtgtggactctttccaaatcatcctggattctttgcttttcttctatgactgttccaataatcccatctctgagcacttccaccccaccgtgattggggagagcatgtacggggactttgaggaagcttttgaccatctgcagaacagactgatcgccaccaagaacccagaagaaatcagaggcgggggacttctcaagtacagcaaccttcttgtgcgggacttcaggcccacagaccaggaagaaatcaaaactctagagcgctacatgtgctccaggttcttcatcgacttcccggacatccttgaacagcagaggaagttggagacttaccttcaaaaccacttcgctgaagaagagagaagcaagtacgactacctcatgatccttcgcagggtggtgaacgagagcaccgtgtgtctcatggggcatgaacgcaggcagactctgaacctcatctccctcctggccttgcgtgtgctggcggaacaaaacatcatccccagtgccaccaacgtcacctgttactaccagccggccccttacgtcagtgatggcaacttcagcaactactacgttgcccatcctccagtcacctacagccagccttaccctacctggctgccctgtaactaaccttgagacctgagggtttccacagtgggaaccccaatagggctagggctctcaggtaggggagcctccttctagatgtaggcatttggcttttaaaggggaactcagctctgattctgcttttttttttttttttcctttgtgtacccattggaatgggtctacagtgtatcatgagccaaccctcaaaggacccgtattacagtgccacgttggaaaacgctacaggaagcatgacctatccacatctttccaagatagacactaacatgtcatgtcccaaacattagcacgtgggggttgagctctgtgcagtaatcgagattgggagaatttgggcagcgcgtgagaagtgctaagctacttgttttctcacttgagcccgggtaggctgtgttggccctcacttgggattctcagcagttacatgaaagttgtgctgataatctcttctcttgtaccaattttagtcaggcagaaaatggtaaacatgagggtgctcttgtgacttaatttttgttcaagggactaaattgcttatgtttattccctgtcagcggagtggagaatgtcattcatcaataaaccaaagccaatagctggagaattgagatctggttgaaagtggtttatggtttacatgctgtactatcctgaggaattgcgagatattgctgaggggaaaaaaaaatgaccttttcttgaaatgtaacttgaaaacaaaataaaatgtggaacataatgtttaattagaattgtggtggtggtagtggaaggggataattgtaaataggaaacatgaatgttcatttttttctttaaagaattcttattaaatggctccctgccttttttttcttttttcctcatcagctctttcatggctgaattttgttttattcttcctaagactgaggattgtgctgagtccagagtcattgtggtaactgacatgagggtcttcccatgttttaactggaaacccactttggtcacattccaagtatgacacagctgttcttctggagtactttagctattttttgtttttgttcttttcgttttttttttttccaaaaatagtgacttccttctccaggtgtgtttgacagcaactcaattcaggaatttcggtagaactgagtgacctgtggaactgctttagaatctaacctgctgtcttcgtgctctgtgtgaaggggaagctggggggttagcatgaagtctggccttgtgtgcattggagcttccaaggcactttgaaatcattccagtatatttgggaagaattgagtgaatgagaatgctcttccttattctggtagatttgacttgtttataattctgcactttagaagaaaaacagtgttaatctgtagttgaaagaaagcttagtagatgagagagttctaggctactgtggctttttccagtagatttagatgagattatgtgttttgaaatgttttgtgggatcccttagaaagcatcacttcagggcagagacactcaatattgccagccagcttgggttctaaagtgatttaatcaaattcatgctcctgatcttttttttcccccttcctttggctatgaaaacccaaagcccggagtgattgttttctccttgctttaagcagtgaagttatcctaatgcaaaagagcttagtagaaaatgagtggtttacctttttttctaaaagtatattttcaagtttattctggaatgtgatgtcttggtcctcttaaaagcagatcagccatgactgaaactcaaggcttagctggtatctatgttgtgctacattaggtgactagaagccacttcttagtgtaatcagctcctgtttccctgtgagccttagttatattttaattcagtggctttgagtcaaggccggttctaattgaggggacccagtgtgcttcagtgttaagagtggggcaatgaagagtgaaccccaatgaagagtgatcccaactttggaaactatctggtcattcatgaccttaaaaagctgccatggtggtcaaatggcatgtgtttgcacaaaaatgaccgatgtgtttaaccaaagctttgaaatgtgatgaagccaccaacataagcacttgcctaacagaaatcagtatttcttctacttagaaggcttggggcccagggtaatgaggcaccagatgaagataagatctgcatcaaggaattaaatttccagtttgtccttggggttctttctgcttatgttttttcccccccatctggtaatagtcctcttctgagaatgaaaggaggcacagaagttgcgagaaagacccagtccccagtctttgccaccattgcaccatggttgtctcggagtcccttcacctgacctttttagtcagctcagatctttttgtagtttgagaatagacctattcaagagctatcagggttaaaagctgcactgaccaaagctgtacttttaaaacacaacccctgggctagtgatgtctctacttgctctatgagccttttgccagcctcagaataggcgaggtaaccttgaatttcagggccctggaaactctagctgaaacctgcctttcctaatgctcacacaagcaccaggtaccctgagcttatactgagtccagtggttcctattttatgtgtgtgtgtatgtgtgtgtgttgagtaacatgaaacttggcagtagcagagagcactgaagttcacatgcaagttctaatctaaagttaagcagtctcttatttgtttcgggactctgatttgactctttttctgatgctttcggcatgtctgcagcctgttctcctagcctgctgcttggagtcaggttgagcatcagtgagatgaagacagtaccttttcctctcacattggcagaatagcacgcactagatgcctgaccttgagctctagtctcccctttaaatcttaccttggcagtaacacattattcctcattcaataatttcaatgctgaaactgaactctattactaatgccttccaatcagagttcctgatggggatgcctgtgggatggcccacacctgggggacctggcagatggggtgagttgggtaaggaagatgatgcttagttcctgatagatgctacagatgtagtttggcatttcagtttttgtccagtttgattttcactggggtttgagtcacagcaagctgtgtatgaacttgtgttttgtggtgacacattaataatcaaattgctaaaaccctgaatctgcttattcttcagcttcacctctgcactaaccccttacccttatggtacgtcaggattttaactagtactgctttgttgactttgggaaatggtgccactcaaaagcaacttcctaacttgaggaataactcctttgtagtttactttctggtactggttggtgccttgtattgggatacagctatattcttagctcaaatgtcctctttttgagagcaaagtagttatccaatggtgagacgagaccctgacgctcatagaggccattccttcctgggtgtcggaccagggctctgtgtcagggaaaaccttctgggtggactttgtaagaatccagtttccaaggttagattcacatccttaatcttgcagagactagaatttcacagctcgctttggaacatattccaattcaaccagttaaaatcagaggaccaagtcgtgggggaggggggcggtgttgaggagaggtatttttaaagatctggcaacttttcaggattatttgtggagaactctaaggttaagatcaggaaataaaagactgtgtgtgtgtgtgtgtgtgcgtgtgtgtgttcaagtgcctaaatcttgtttacctatcactttaaaaaaataattgaagtgtaagctaaataaaatgcttggagttttgcctgggctagtgagagttggtgcaaattcttgtgtgtgtttgcataggaaggtgagatgaccatctactaaagaggaagtagctaaatacagatctgtgggtgtttttaaaaaaactcaacctatctggtgttttattttaatggataaaaatgtaatttttctaaggtagcaacttatttccaaattaatatagatgaaaaatagataccaattagactaaattgaaagctttttgttctatatttgcatagcctttgaaatatttcttagtgcctaggaggtctggggattcctctttcgtggtggtcactaaccttacttgatgcagataaaatcacttgtcaatgcaaaatgtgttagaacttgataaagctttgagtttgagaaataaaggtatatttaaaatttaaataaaacttgtcatttatgctca

SEQ ID NO: 245 - DNA, 3597 bp, Homo sapiens
ggagcaggcgtgcgggccgtgagcggcgccagagggtacctggctctgtggaggggccctctggtatgtgtgtccctgtccttctggggcgtggatggtgcctgggacccagctggcaaccagttgaagacgttctccttggaagctcttggccctgaggactttgcctggggcattggccctgccatggcgttccggagggccgagggcacgtctatgatccaggccctggccatgacggtggccgagatccccgtgttcctgtacacgacgtttgggcagtctgcattctcccagctacggttgacgccaggcctgcggaaagtcctctttgccacggccctggggactgtggccctggccctggctgcccaccagctgaagaggcgacggaggaggaagaagcaggttggtcccgagatgggaggggagcagctgggcacggtgcccctccctatcctcttggccaggaaggtcccttcagtgaagaaaggatactccagccggagagtccagagccccagcagcaagagcaacgacaccctgagtggcatctcttccattgagcccagcaagcactcgggctcctcccacagtgtggcctcgatgatggcagtgaactcatccagccccacagccgcgtgctcgggactatgggatgccagagggatggaggagtctctgaccaccagcgacggcaatgcagagagcctgtacatgcaaggcatggagctgtttgaggaagctctgcagaagtgggagcaggcactaagcgtgggccagcggggggacagcggcagcacccccatgcccagggacggcctccggaacccagagactgcatcagagccactgtctgagccagagtcacagcggaaggagtttgcagagaagctggagtccctgctgcaccgtgcctaccacctgcaggaggagttcggctccaccttccccgcagacagcatgctgctagacctcgagaggaccctcatgctgcccctgaccgagggctcgctgcggctgcgggcggacgatgaggacagcctgacttcagaggattccttcttctccgccaccgagctctttgagtccctgcagactggagattacccgatcccactctccagacccgccgctgcctatgaggaggccctgcagctggtgaaggaggggagagtgccttgccggaccctcaggacggagctgctgggctgctacagtgaccaggactttctggccaagctgcactgtgtgcggcaggccttcgaggggcttctggaagacaagagtaaccagcttttcttcgggaaagtgggccgacagatggtgacaggcctgatgaccaaggctgagaagagccccaaaggcttcctggagagctacgaggagatgctgagctatgccctgcggcccgagacctgggccacaacacggctggagctggagggccgaggggtggtatgcatgagcttcttcgacatcgtgctggacttcatcctcatggacgccttcgaggacctggagaaccctccggcctcggtgctcgccgtcctgcggaaccgctggctgtcagacagcttcaaggagacggccttggccactgcttgctggtcggtcctgaaagccaagaggaggctgctgatggtgcctgatggcttcatctcccatttctactccgtatcggagcatgtgagccctgtcctagccttcggcttccttggacccaagcctcagcttgctgaagtctgtgctttcttcaagcaccagattgtgcagtacctgagggacatgttcgacctggacaatgtgcgctacacgtcactgcccgcgctggcagacgacatcctgcagctgtcccggcgccgcagcgagatattgctggggtacctgggggtgcccgcggccagcagcgcaggcgtgaatggggcgctgccccgagagaatgggcccctgggggagctgcagtagaggcggcacgggctggggggtggcagagagaaggctcctcctcccttccctgggttggtatctgacagctgtggtggctgagggccgttgcccctgactttgccccacccccatcatctgggagtccccaaggcccagaggggacatttccatggagaagaacggttcctgggggaagcagaggccaggaccagtggggcctgtgggagagaaaggctgtgagagagggggttgttgtggagaattgggacaggcagagccaggatgccccaggtgggggaccccaaaacctcccatcgctccagggctgctgacaagggtgctgggagggtggaggtgaaggatggggcctagagccctgtggtgaaggtcacagtgtcctgagctagaagccacctgtggctatatggtctcagcatccagctggcctgtcctgatgccctccccacctcaaccgccttctcagagagtttgcaactccagagaaggagagtggggccaccttagtgggcagcaggcctgggccatccagagatggggcagaggtgggcctcccactcctgtgctctcttctgagcaggaactgggcccttgacagtgtcctttgacattccctcgccctaccaaagatcgtcttttctcctcccacctctgtcaccaccaaagacgggcggaggtggggctgggccctcctgcccccgcccatcccccttccatgagcccagacctccctgggtggtgctaggctctgagctgggggctcagaccagggatcgctcaggcccctgtcacctgtgggcccggggaccacttgggggaggtcagaggatgtatgtggccggaccagcttccccaccttcattaggacaagaaactgcccagcactttgccttcagttcaacgcacaaacgctcctggggcctcatgggggcagagcctcccctgggcctgcagagagtcctgttagcagcgacgtccccccgccgcggggtcctgtcagcccggcagtgtcttctcagtgtcttcacctgagcgagtgtctgtggccccaacgcgttctgctgtggctctgccctttccaggttgagaggcctgcaggagaaacacactcccctcctgggtttccacactcaggaggtcagaggactggctcctgtgaccagggcccctctcccctgaatgggaaaggggtctggggatgggagggcgcaccacagagaggagatgatgctgggtgtggcccatcttctgtgggccccttcccagacaccggatccatgggcactaacccgcctcccaggctgatgcccggaggcagcttcctgggcaggagggttccatgggcactaacccacctcccaggctgatgcctggaggcagcctccagggcaggaaggaccctgtgctccccgccccccatcctgacatcctgttcttttgcacttaccctgtgctgtgaatgtaacagtgggccttggccccgcccactctgatttgcattttcatttgtgtttgtttacacatccatgcactgcctgtagcagtcgattgtcacagcttcgacttttggatggtagagtgtgtgcactgactgtgagtcgaataaacaattgagacgaaaaaaaaaaa

SEQ ID NO: 246 - DNA, 1276 bp, Homo sapiens
ggcaggcgcgtggccgggccgcggcgcgatgagtggggcccgggcggcgcccggggccgcgggcaacggcgcggtccgggggctgcgggtggacgggctgcccccgctgccaaagagcttgagcgggctgctgcactcggcgtcgggcggcggcgcgtctgggggctggcggcacctggagcggctgtacgcgcagaagtcgcgcatccaggacgagctgagccgcgggggcccgggcggcggcggggcccgggcggcagcgctgcccgccaagcctcccaacctggacgccgctctggcgctgctccgcaaagagatggttggtctccgccagctggacatgtccttgctctgccaactgtacagcctctacgagtcgattcaggagtacaagggggcatgccaggcagcctccagcccagactgcacttacgctctggagaacggcttcttcgatgaagaggaggaatatttccaggagcagaactccctgcacgacaggagggaccgaggccctcctcgggacttgtcactgcctgtctcctccctctccagcagcgactggattctggagtccatctagagggtcttgggagggatgtgactgttgggaagcccttcctactggacacgctgtcatcatttgctgcttctcttgcaagaaagcacctccgttgtggacggtcctcgggcacaggggatgagcgctaccagtttcatttgtaggcagggagttctccgcggatgcatggtggcagtctgctttgatggcagcagttatctgcttaggtgacctagaggtcctcagcagtatcctccacacctatttattgaggtgcacctgctggggattcataatgagaatataacaagaggatctcggtgaaaggccttagtgggtgttttgtgtgaggtggcttgtagctagctacttccttacagatggtagagtattccaatcctctttgtgttagggttcttgcttccagtttgggatgtattaaaaccaccatttcactgcttcccttcctcaatatgctctgcagcttttcttgctgtttaaacctctcgcctcagctttatttatttgtaagctgcattactaactgcccagtgattcggtgaaagctttttactgaaaaagttaacatttctagtcatcccaatcaactggcttttttcaaccaaaattttatatcattctttgtctatcagatacgagaggaaggaagataatacgaagacatgttgaatagtgaaaaaaaaaaaaaaaaaa

SEQ ID NO: 247 - DNA, 1324 bp, Homo sapiens
atgcctggctgcctggccttaaagcagcaaatactgggcccccgcaaggtcccctgccgtgcgcgaggcagcatgatgaggtgcaccctggaaaatcggaacgctcaaacgaaacaactgcaaacagctgtctcaaatgtggagaagcattttggagaactgtgccaaatcttcgctgcctatgtgcggaaaactgccaggctgagagacaaagcagaccacctggtgaatgaaatcaatgcgtatgctgctacagagaccccacatttaaagctgggcctgatgaactttgatgatgagtttgccaaacttcaggattatcgacaagcagaggttgaaagacttgaagccaaagtagttgaacccctggttgaacccttgaaagcttatgggaccattgtgaaaatgaaacgggatgacctcaaagcaacattcacagcaaggaatcgagaagctaagcaattaactcagaaagaacacgtcagcgaaacccatctgatcgacatgttatttcacaggcagaaacggaattacagagaactgcaatggatgctagccgaacaagtcgtcatctggaggaaactattaacaactttgaaaggcagaaaatgaaggatataaagactatattttctgaatttatcacaatcgaaatgttatttcacggcaaagctttagaggtctacactgctgcctaccggaatatacaaaacattgatgaagatgaagatttagaggttttccgaaattctctgtatgcaccagattattcatcttgtttagatactgtaagagcgaattcaaagtcacctcttcagagatcactgtcagctaagtgtgtatctggaacaagacaggtatccacttgtcgactaagaaaggatcaacaagcagaagatgatgaggatgaagagttagatgttacagaagaagaaaattttcttaactacacatttccattttcatcataaatgacataaaatccacaatgactaaattgtagaactttatactcactttgatatgttaagcctcaaagtgaagtccaactggaaacagaaaaatatttaaagaaaacttatgctgaccaaaaatgaaggctttaaaaaaatattgcataccagtcatttcaacatcctacctagtgttacatgatttttgtgtaagtgcctttttttagaagatggtgtatttcaaagtatttcatattaatgtactatatctacttgaagttccaatagtgcattatgacagaaaccaaaagatctaacaattctgcttagctttttggttaagactccatgctttcattaccagaaaaggg

SEQ ID NO: 248 - DNA, 2313 bp, Homo sapiens
ctcctcccgggcgggataattgaacggcgcggccctggcccagcgttggctgccgaggctcggccggagcgtggagcccgcgccgctgccccaggaccgcgcccgcgcctttgtccgccgccgcccaccgcccgtcgcccgccgcccatggagcgcgccgcgccgtcgcgccgggtcccgcttccgctgctgctgctcggcggccttgcgctgctggcggccggagtggacgcggatgtcctcctggaggcctgctgtgcggacggacaccggatggccactcatcagaaggactgctcgctgccatatgctacggaatccaaagaatgcaggatggtgcaggagcagtgctgccacagccagctggaggagctgcactgtgccacgggcatcagcctggccaacgagcaggaccgctgtgccacgccccacggtgacaacgccagcctggaggccacatttgtgaagaggtgctgccattgctgtctgctggggagggcggcccaggcccagggccagagctgcgagtacagcctcatggttggctaccagtgtggacaggtcttccgggcatgctgtgtcaagagccaggagaccggagatttggatgtcgggggcctccaagaaacggataagatcattgaggttgaggaggaacaagaggacccatatctgaatgaccgctgccgaggaggcgggccctgcaagcagcagtgccgagacacgggtgacgaggtggtctgctcctgcttcgtgggctaccagctgctgtctgatggtgtctcctgtgaagatgtcaatgaatgcatcacgggcagccacagctgccggcttggagaatcctgcatcaacacagtgggctctttccgctgccagcgggacagcagctgcgggactggctatgagctcacagaggacaatagctgcaaagatattgacgagtgtgagagtggtattcataactgcctccccgattttatctgtcagaatactctgggatccttccgctgccgacccaagctacagtgcaagagtggctttatacaagatgctctaggcaactgtattgatatcaatgagtgtttgagtatcagtgccccgtgccctatcgggcatacatgcatcaacacagagggctcctacacgtgccagaagaacgtgcccaactgtggccgtggctaccatctcaacgaggagggaacgcgctgtgttgatgtggacgagtgcgcgccacctgctgagccctgtgggaagggacatcgctgcgtgaactctcccggcagtttccgctgcgaatgcaagacgggttactattttgacggcatcagcaggatgtgtgtcgatgtcaacgagtgccagcgctaccccgggcgcctgtgtggccacaagtgcgagaacacgctgggctcctacctctgcagctgttccgtgggcttccggctctctgtggatggcaggtcatgtgaagacatcaatgagtgcagcagcagcccctgtagccaggagtgtgccaacgtctacggctcctaccagtgttactgccggcgaggctaccagctcagcgatgtggatggagtcacctgtgaagacatcgacgagtgcgccctgcccaccgggggccacatctgctcctaccgctgcatcaacatccctggaagcttccagtgcagctgcccctcgtctggctacaggctggcccccaatggccgcaactgccaagacattgatgagtgtgtgactggcatccacaactgctccatcaacgagacctgcttcaacatccagggcggcttccgctgcctggccttcgagtgccctgagaactaccgccgctccgcagccacccgctgtgagcgcttgccttgccatgagaatcgggagtgctccaagctgcctctgagaataacctactaccacctctctttccccaccaacatccaagcgcccgcggtggttttccgcatgggcccctccagtgctgtccccggggacagcatgcagctggccatcaccggcggcaatgaggagggctttttcaccacccggaaggtgagcccccacagtggggtggtggccctcaccaagcctgtccccgagcccagggacttgctcctgaccgtcaagatggatctctctcgccacggcaccgtcagctcctttgtggccaagcttttcatctttgtgtctgcagagctctgagcactcgcttcgcgtcgcggggtctccctcctgttgctttcctaaccctgccctccggggcgttaataaagtcttagcaagcgtcccacacagtgaaaaaaaaaaaaaaaaaaa

SEQ ID NO: 249 - DNA, 2646 bp, Homo sapiens
ttctgcccgggcgctcgcagccgagcgcggccggggaagggctctcctcccagcgccgagcactgggccctggcagacgccccaagattgttgtgaggagtctagccagttggtgagcgctgtaatctgaaccagctgtgtccagactgaggccccatttgcattgtttaacatacttagaaaatgaagtgttcatttttaacattcctcctccaattggtttaatgctgaattactgaagagggctaagcaaaaccaggtgcttgcgctgagggctctgcagtggctgggaggaccccggcgctctccccgtgtcctctccacgactcgctcggcccctctggaataaaacacccgcgagccccgagggcccagaggaggccgacgtgcccgagctcctccgggggtcccgcccgcgagctttcttctcgccttcgcatctcctcctcgcgcgtcttggacatgccaggaataaaaaggatactcactgttaccattctggctctctgtcttccaagccctgggaatgcacaggcacagtgcacgaatggctttgacctggatcgccagtcaggacagtgtttagatattgatgaatgccgaaccatccccgaggcctgccgaggagacatgatgtgtgttaaccaaaatggcgggtatttatgcattccccggacaaaccctgtgtatcgagggccctactcgaacccctactcgaccccctactcaggtccgtacccagcagctgccccaccactctcagctccaaactatcccacgatctccaggcctcttatatgccgctttggataccagatggatgaaagcaaccaatgtgtggatgtggacgagtgtgcaacagattcccaccagtgcaaccccacccagatctgcatcaatactgaaggcgggtacacctgctcctgcaccgacggatattggcttctggaaggccagtgcttagacattgatgaatgtcgctatggttactgccagcagctctgtgcgaatgttcctggatcctattcttgtacatgcaaccctggttttaccctcaatgaggatggaaggtcttgccaagatgtgaacgagtgtgccaccgagaacccctgcgtgcaaacctgcgtcaacacctacggctctttcatctgccgctgtgacccaggatatgaacttgaggaagatggcgttcattgcagtgatatggacgagtgcagcttctctgagttcctctgccaacatgagtgtgtgaaccagcccggcacatacttctgctcctgccctccaggctacatcctgctggatgacaaccgaagctgccaagacatcaacgaatgtgagcacaggaaccacacgtgcaacctgcagcagacgtgctacaatttacaagggggcttcaaatgcatcgaccccatccgctgtgaggagccttatctgaggatcagtgataaccgctgtatgtgtcctgctgagaaccctggctgcagagaccagccctttaccatcttgtaccgggacatggacgtggtgtcaggacgctccgttcccgctgacatcttccaaatgcaagccacgacccgctaccctggggcctattacattttccagatcaaatctgggaatgagggcagagaattttacatgcggcaaacgggccccatcagtgccaccctggtgatgacacgccccatcaaagggccccgggaaatccagctggacttggaaatgatcactgtcaacactgtcatcaacttcagaggcagctccgtgatccgactgcggatatatgtgtcgcagtacccattctgagcctcgggctggagcctccgacgctgcctctcattggcaccaagggacaggagaagagaggaaataacagagagaatgagagcgacacagacgttaggcatttcctgctgaacgtttccccgaagagtcagccccgacttcctgactctcacctgtactattgcagacctgtcaccctgcaggacttgccacccccagttcctatgacacagttatcaaaaagtattatcattgctcccctgatagaagattgttggtgaattttcaaggccttcagtttatttccactattttcaaagaaaatagattaggtttgcgggggtctgagtctatgttcaaagactgtgaacagcttgctgtcacttcttcacctcttccactccttctctcactgtgttactgctttgcaaagacccgggagctggcggggaaccctgggagtagctagtttgctttttgcgtacacagagaaggctatgtaaacaaaccacagcaggatcgaagggtttttagagaatgtgtttcaaaaccatgcctggtattttcaaccataaaagaagtttcagttgtccttaaatttgtataacggtttaattctgtcttgttcattttgagtatttttaaaaaatatgtcgtagaattccttcgaaaggccttcagacacatgctatgttctgtcttcccaaacccagtctcctctccattttagcccagtgttttctttgaggaccccttaatcttgctttctttagaatttttacccaattggattggaatgcagaggtctccaaactgattaaatatttgaagagaaaaaaaaaaaaaaaaaaaaaaaaa

SEQ ID NO: 250 - DNA, 11626 bp, Homo sapiens
gggagccgcggcagagactgtgggtgccacaagcggacaggagccacagctgggacagctgcgagcggagccgagcagtggctgtagcggccacgactgggagcagccgccgccgcctcctcgggagtcggagccgccgcttctccactggcaggggccgcctgaagtgggagcagcgcctggagaaggcgggaggagcccggcccgggggacgggcggcgggatagcgggaccccggcggcgcggtgcgcttcagggcgcagcggcggccgcagaccgagccccgggcgcggcaagaggcggcgggagccggtggcggctcggcatcatgcgtcgagggcgtctgctggagatcgccctgggatttaccgtgcttttagcgtcctacacgagccatggggcggacgccaatttggaggctgggaacgtgaaggaaaccagagccagtcgggccaagagaagaggcggtggaggacacgacgcgcttaaaggacccaatgtctgtggatcacgttataatgcttactgttgccctggatggaaaaccttacctggcggaaatcagtgtattgtccccatttgccggcattcctgtggggatggattttgttcgaggccaaatatgtgcacttgcccatctggtcagatagctccttcctgtggctccagatccatacaacactgcaatattcgctgtatgaatggaggtagctgcagtgacgatcactgtctatgccagaaaggatacatagggactcactgtggacaacctgtttgtgaaagtggctgtctcaatggaggaaggtgtgtggccccaaatcgatgtgcatgcacttacggatttactggaccccagtgtgaaagagattacaggacaggcccatgttttactgtgatcagcaaccagatgtgccagggacaactcagcgggattgtctgcacaaaaacgctctgctgtgccacagtcggccgagcctggggccacccctgtgagatgtgtcctgcccagcctcacccctgccgccgtggcttcattccaaatatccgcacgggagcttgtcaagatgtggatgaatgccaggccatccccgggctctgtcagggaggaaattgcattaatactgttgggtcttttgagtgcaaatgccctgctggacacaaacttaatgaagtgtcacaaaaatgtgaagatattgatgaatgcagcaccattcctggaatctgtgaagggggtgaatgtacaaacacagtcagcagttacttttgcaaatgtccccctggtttttacacctctccagatggtaccagatgcatagatgttcgcccaggatactgttacacagctctgacaaacgggcgctgctctaaccagctgccacagtccataaccaaaatgcagtgctgctgtgatgccggccgatgctggtctccaggggtcactgtcgcccctgagatgtgtcccatcagagcaaccgaggatttcaacaagctgtgctctgttcctatggtaattcctgggagaccagaatatcctcccccaccccttggccccattcctccagttctccctgttcctcctggctttcctcctggacctcaaattccggtccctcgaccaccagtggaatatctgtatccatctcgggagccaccaagggtgctgccagtaaacgttactgattactgccagttggtccgctatctctgtcaaaatggacgctgcattccaactcctgggagttgccggtgtgagtgcaacaaagggttccagctggacctccgtggggagtgtattgatgttgatgaatgtgagaaaaacccctgtgctggtggtgagtgtattaacaaccagggttcgtacacctgtcagtgccgagctggatatcagagcacactcacgcggacagaatgccgagacattgatgagtgtttacagaatggccggatctgcaataatggacgctgcatcaacacagatggcagttttcattgcgtgtgtaatgcgggctttcatgttacacgagatgggaagaactgtgaagatatggatgaatgcagcataaggaacatgtgccttaatggaatgtgtatcaatgaagatggcagttttaaatgtatttgcaaacctggattccagctggcatcagatggacgttattgcaaagacattaacgagtgtgaaacccctgggatctgcatgaatgggcgttgcgtcaacactgatggctcctacagatgtgaatgcttccctggactggctgtgggtctggatggccgtgtgtgtgttgacacacacatgcggagcacatgctatggtggatacaagagaggccagtgtatcaaacctttgtttggtgctgtcactaaatctgaatgctgttgcgccagcactgagtatgcatttggggaaccttgccagccgtgtcctgcacagaattcagcggaatatcaggcactctgcagcagtgggccaggaatgacgtcagcaggcagtgatataaatgaatgtgcactagatcctgatatttgcccaaatggaatctgtgaaaaccttcgtgggacctataaatgtatatgcaattcaggatatgaagtggattcaactgggaaaaactgcgttgatattaatgaatgtgtactgaacagtctcctttgtgacaatggacaatgtagaaatactcctggaagttttgtctgtacctgccccaagggatttatctacaaacctgatctaaaaacatgtgaagacattgatgaatgcgaatcaagtccttgcattaatggagtctgcaagaacagcccaggctcttttatttgtgaatgttcttctgaaagtactttggatccaacaaaaaccatctgcatagaaaccatcaagggcacttgctggcagactgtcattgatgggcgatgtgagatcaacatcaatggagccaccttaaagtcccagtgctgctcctccctcggtgctgcgtggggaagcccgtgcaccctatgccaagttgatcccatatgtggtaaagggtactcaagaattaaaggaacacaatgtgaagatatagatgaatgtgaagtgttcccaggagtgtgtaaaaatggcctgtgtgttaacactagggggtcattcaagtgtcagtgtcccagtggaatgactttggatgccacaggaaggatctgtcttgatatccgcctggaaacctgcttcctgaggtacgaggacgaggagtgcaccctgcctattgctggccgccaccgcatggacgcctgctgctgctccgtcggggcagcctggggtactgaggaatgcgaggagtgtcccatgagaaatactcctgagtacgaggagctgtgtccgagaggacccggatttgccacaaaagaaattacaaatggaaagcctttcttcaaagatatcaatgagtgcaagatgatacccagcctctgcacccacggcaagtgcagaaacaccattggcagctttaagtgcaggtgtgacagcggctttgctcttgattctgaagaaaggaactgcacagacattgacgaatgccgcatatctcctgacctctgtggcagaggccagtgtgtgaacacccctggggactttgaatgcaagtgtgacgaaggctatgaaagtggattcatgatgatgaagaactgcatggatattgatgagtgtcagagagatcctctcctatgccgaggtggtgtttgccataacacagagggaagttaccgctgtgaatgcccgcctggccatcagctgtcccccaacatctccgcgtgtatcgacatcaatgaatgtgagctgagtgcacacctgtgccccaatggccgttgcgtgaacctcatagggaagtatcagtgtgcctgcaaccctggctaccattcaactcccgataggctattttgtgttgacattgatgaatgcagcataatgaatggtggttgtgaaaccttctgcacaaactctgaaggcagctatgaatgtagctgtcagccgggatttgcactaatgcctgaccagagatcatgcaccgacatcgatgagtgtgaagataatcccaatatctgtgatggtggtcagtgcacaaatatccctggagagtacaggtgcttgtgttatgatggattcatggcatctgaagacatgaagacttgtgtagatgtcaatgagtgtgacctgaatccaaatatctgcctaagtgggacctgtgaaaacacgaaaggctcatttatctgccactgtgatatgggctactccggcaaaaaaggaaaaactggctgtacagacatcaatgaatgtgaaattggagcacacaactgtggcaaacatgctgtatgtaccaatacagcaggaagcttcaaatgtagctgcagtcccgggtggattggagatggcattaagtgcactgatctggacgaatgttccaatggaacccatatgtgcagccagcatgcagactgcaagaataccatgggatcttaccgctgtctgtgcaaggaaggatacacaggtgatggcttcacttgtacagaccttgatgagtgctctgagaacctgaatctctgtggcaatggccagtgcctcaatgcaccaggaggataccgctgtgaatgcgacatgggcttcgtgcccagtgctgacgggaaagcctgtgaagatattgatgagtgctcccttccgaacatctgtgtctttggaacttgccacaacctccctggcctgttccgctgtgagtgtgagataggctacgaactggacagaagcggcgggaactgcacagatgtgaatgaatgcctggatccaaccacgtgcatcagtgggaactgtgtcaacactccaggcagctatatctgtgactgcccacctgattttgaactgaacccaactcgagttggctgtgttgatacccgctctggaaattgctatttggatattcgacctcgaggagacaatggagatacagcctgcagcaatgaaattggagttggtgtttccaaagcttcctgctgctgttctctgggtaaagcctggggtactccttgtgagatgtgtcctgctgtgaacacatccgagtacaaaattctttgtcctggaggggaaggtttccgaccaaatcctatcaccgttatattggaagatattgatgagtgccaggagctaccagggctgtgccaaggaggaaaatgtatcaacacctttgggagtttccagtgccgctgtccaaccggctactacctgaatgaagatacacgagtgtgtgatgatgtgaatgaatgtgagactcctggaatctgtggtccagggacatgttacaacaccgttggcaactacacctgtatctgtcctccagactacatgcaagtgaatgggggaaataattgcatggatatgagaagaagtttgtgctacagaaactactatgctgacaaccagacctgtgatggagaattgttattcaacatgaccaagaagatgtgctgctgttcctacaacattggccgggcgtggaacaagccctgtgaacagtgtcccatcccaagtacagatgagtttgctacactctgtggaagtcaaaggccaggctttgtcatcgacatttataccggtttacccgttgatattgatgagtgccgggagatcccaggggtctgtgaaaatggagtgtgtatcaacatggttggcagcttccgatgtgaatgtccagtgggattcttctataatgacaagttgttggtttgtgaagatattgacgagtgtcagaacggcccagtgtgccagcgcaacgccgaatgcatcaacactgcaggcagctaccgctgtgactgtaagcccggctaccgcttcacctccacaggacagtgcaatgatcgtaatgaatgtcaagaaatccccaatatatgcagtcatgggcagtgcattgacacagttggaagcttttattgcctttgccacactggttttaaaacaaatgatgaccaaaccatgtgcttggacataaatgaatgtgaaagagatgcctgtgggaatggaacttgccggaacacaattggttccttcaactgccgctgcaatcatggtttcatcctttctcacaacaatgactgtatagatgttgatgaatgtgcaagtggaaatgggaatctttgcagaaatggccaatgcattaatacagtggggtctttccagtgccagtgcaatgaaggctatgaggtggctccagatgggaggacctgtgtggatatcaatgaatgtcttctagaacccagaaaatgtgcaccaggtacctgtcaaaacttggatgggtcctacagatgcatttgcccacctggatacagtcttcaaaatgagaagtgtgaagatattgatgagtgtgtcgaagagccagaaatttgtgccctgggcacatgcagtaacactgaaggcagcttcaaatgtctgtgtccagaagggttttccttgtcctccagtggaagaaggtgccaagatttgcgaatgagctactgttatgcgaagtttgaaggaggaaagtgttcatcacccaaatccagaaatcactccaagcaggaatgctgctgtgccttgaagggagaaggctggggagacccctgcgagctctgccccacggaacctgatgaggccttccgccagatatgtccttatggaagtgggatcatcgtgggacctgatgattcagcagttgatatggacgaatgcaaagaacccgatgtctgtaaacatggacagtgcatcaatacagatggttcctatcgctgcgagtgtccctttggttatattctagcagggaatgaatgtgtagatactgatgaatgttctgttggcaatccttgtggaaatggaacctgcaagaatgtgattggaggttttgaatgcacctgcgaggagggatttgagcccggtccaatgatgacatgtgaagatataaatgaatgtgcccagaatcctctgctctgtgccttccgatgtgtgaacacttatgggtcatatgaatgcaaatgtcccgtgggatatgtgctcagagaagaccgtaggatgtgcaaagatgaggatgagtgtgaagagggaaaacatgactgtactgaaaaacaaatggaatgcaagaacctcattggcacatatatgtgcatctgtggacccgggtatcagcggagacctgatggagaaggctgtgtagatgagaatgaatgtcagacgaagccagggatctgtgagaatgggcgctgcctcaacacccgtgggagctacacctgtgagtgtaatgatgggtttaccgccagccccaaccaggacgagtgccttgacaatcgggaagggtactgcttcacagaggtgctacaaaacatgtgtcagatcggctccagcaacaggaaccccgtcaccaaatcggaatgctgctgtgacggagggagaggctggggtccccactgtgagatctgccctttccaggggactgtggctttcaagaaactctgtccccatggccgaggattcatgaccaatggagcagatatcgatgaatgcaaggttattcacgatgtttgccgaaatggggaatgtgtcaatgacagaggatcatatcattgcatttgtaaaactgggtacactccagatataactgggacttcctgtgtagatctgaacgagtgcaaccaggctcccaaaccctgcaattttatctgcaaaaacacagaagggagttaccagtgttcatgcccgaaaggctacattctgcaagaggatggaaggagctgcaaagatcttgatgagtgtgcaaccaagcaacacaactgccagttcctatgtgttaacaccattggcggcttcacatgcaaatgtcctcccggatttacccaacaccatacgtcctgcattgataacaatgaatgcacctctgacatcaatctgtgcgggtctaagggcatttgccagaacactcctggaagcttcacctgtgaatgccagcggggattctcacttgatcagaccggctccagctgtgaagacgtggacgagtgtgagggtaaccaccgctgccagcatggctgccagaacatcattgggggctacaggtgcagctgcccccagggctacctccagcactaccagtggaaccagtgtgttgatgaaaacgaatgcctcagcgctcacatctgcggaggagcctcctgtcacaacaccctggggagctacaagtgcatgtgtcccgccggcttccagtatgaacagttcagtggaggatgccaagacatcaatgaatgtggctctgcgcaggccccctgcagctatggctgttccaataccgagggcggttacctgtgtggctgtccacctggttacttccgcataggccaagggcactgtgtttctggaatgggcatgggccgaggaaacccagagccacctgtcagtggtgaaatggatgacaattcactctccccagaggcttgttacgagtgtaagatcaatggctaccccaaacggggcaggaaacggagaagcacaaacgaaactgatgcctccaatatcgaggatcagtctgagacagaagccaatgtgagtcttgcaagttgggatgttgagaagacagccatctttgctttcaatatttcccacgtcagtaacaaggttcgaatcctagaactccttccagctcttacaactctgacgaatcacaacagatacttgatcgaatctggaaatgaagatggcttctttaaaatcaaccaaaaggaagggatcagctacctccacttcacaaagaagaagccagtggctggaacctattcattacaaatcagtagtactccactttataaaaagaaagaacttaaccaactagaagacaaatatgacaaagactacctcagtggtgaactgggtgataatctgaagatgaaaatccaggttttgcttcattaattcaccatccagagaccaaataattaaaagaaaaacaaatatagataggtagaactatattttcccccaatcagaatcatcatatcataggtacaatctttcaccaagtaaatttgtataaataagcactattctttgtattaccaaagcaaggtacaggtgactaccctagttcaaaacaaccactttctcaggcttctcatgtgtgtagctaagctaccttgtcatatgtgttgattcttgaaaactgggacgtgtatttccattgggggttggccatttatgctgacatgccatccttccagcaaacgtacgggaatgtgctttcaattgatggactactctattttttgcaaatttgtaaactttgcttctccaaatacaagtactaggttgtccatttatggtacctatttggtgctagtaaattttcaaactagatttataaatgcactgtaatatgtacacaacttagaaaccaaattacaagtattcagttccaatacttcattaatttcaatcaaccaaagttagttcagtagcttatctcagttatgagtataatacattacatgtaaattaagtgtgtgtatactgtaatcgtgctattttttatcattgaaacatttataaactagaataataatgcccttaatgtgagggtttgtaatggtgcttattaagaccaaagacttgttaaatgtatacaccaagtggtaatgaaatttcggtgactggcccacacgtgcatagaggtctgggaggaccaggaaacagcctcagtggccagaggatcaccagtgcatccttcatcacagcatgtgcaatatgccaagattaccctcggtcattcctgtcaacaaggggtcaatgtcataaatgtcacaataaaacaatctcttcttttttttagtttaccccttggctttgtgttcttgcatggatttggggttggaggggccattccggaggctaaataaagtctcctggatttaaattatcctgggtctcttacttatggcttatgaaagtaccaaatgtataaccactagaagaaaatttaacatatgagtcgatcccttgttttatccattgaaagtagcagagtctggtgtcattaacctgacttgcttgtgagaaatttagattgtagagtcatttctgaaacatgacctaattcatcttgtgacttttaaatagtcttaaataccaagttcagtcattgtcttagagcacatgaatttcattataatagatttatcatgcccccctctcaaatatacacagttttggcaagccttaggtgttctgttccatttttttttcccctaaacatctttcgttagtcaatgctcatctaattacaaagggataatcccagactgtatccaattgctgtaacttttggtttcttaatgtcataatttttaaagtctgttttattttaagtgcaatattgagtatttagctgttaggctcaatccgtcgatatgaaataattttttaaatccctaagggcaggaaagcatttcgtggtagtgaaaataagaggaaataagatggcatgaaggtggtgggcggagaaactaggtaggacacaggaaagtgctctcaaaaatctttgaagagctcagctgaaaaaaatggagtagatttggctcatactattccggaaggcaaaaccagggtcagctgatgtcagccccagtttaatacacacggtcccaattatagagctactcactgaaagaatgggtttccttgcattgtggtgagctccctgtcacaagatagaagagtttcagtctaggcttaatggcaaccattggacaaagatgctttcttccacctaacaggccattaacatcttaaaggtatttttgtatctctaattttgtttataataggtgctcaacagaatgagctgaatggctgttacaaagggggtttgtaccttgggtaagagattaaaatataactcaaaatttccttctaacgctgcacctatggaaccatgtgatagaggtgtattaaaattgttatcgaagaatatatagcatatggtaaacaacagtttgcatatggaaaatgtctttgataatttaaccagaactgcattatattcaataacggattttctttataacaaacaacaggggaaaatggagttggcacacagtggatcactttgatatttttaatagtccaagtctggattttatttattcctgagccaacaattttgaacagcatattttccatgtttctgactgtaacaaaacattttcctcattgttccattgtaaatattcctcttgttggaactctttttaatcctgagatttaaacctgtacctttcaattgtctgtgacctttcaatttcactttcaatagttgaagaacttggctttgtaaatctctcagaagcttgaaaatatcttgtctctaccccctcagcccatttcatttgccaataattattttgtaagtagggttgaaatgaactcagctggccttgtgaaatgtttaaacttgcacaaacaactacatttttgttcaacaaatagcagtttactcagccaaaatcactttggatattgccattacaaatactgttaaacttcagaaatcatgtctgtaaattagatgagccaaaataaaggacaattgggttgatgctg

SEQ ID NO: 251 - DNA, 1535 bp, Homo sapiens
gcgcgttcgggagcttcggccctgcgtaggaggcgggtgcaggtgtgggtgctgagccgcccgccgcctggagggggagacagcttcaggacacgcaggccgcagcgagggcccgggcccgggggatcccaggccatggatgctccccactccaaagcagccctggacagcattaacgagctgcccgagaacatcctgctggagctgttcacgcacgtgcccgcccgccagctgctgctgaactgccgcctggtctgcagcctctggcgggacctcatcgacctcatgaccctctggaaacgcaagtgcctgcgagagggcttcatcaccaaggactgggaccagcccgtggccgactggaaaatcttctacttcctacggagcctgcataggaacctcctgcgcaacccgtgtgctgaagaggatatgtttgcatggcaaattgatttcaatggtggggaccgctggaaggtggagagcctccctggagcccacgggacagattttcctgaccccaaagtcaagaagtattttgtcacatcctacgaaatgtgcctcaagtcccagctggtggaccttgtagccgagggctactgggaggagctactagacacattccggccggacatcgtggttaaggactggtttgctgccagagccgactgtggctgcacctaccaactcaaagtgcagctggcctcggctgactacttcgtgttggcctccttcgagcccccacctgtgaccatccaacagtggaacaatgccacatggacagaggtctcctacaccttctcagactacccccggggtgtccgctacatcctcttccagcatgggggcagggacacccagtactgggcaggctggtatgggccccgagtcaccaacagcagcattgtcgtcagccccaagatgaccaggaaccaggcctcctccgaggctcagcctgggcagaagcatggacaggaggaggctgcccaatcgccctaccgagctgttgtccagattttctgacagctgtccatcctgtgtctgggtcagccagaggttcctccaggcaggagctgagcatggggtgggcagtgaggtccctgtaccagcgactcctgccccggttcaaccctaccagcttgtggtaacttactgtcacatagctctgacgttttgttgtaataaatgttttcaggccgggcactgtggctcacgcctgtaatcccagcactttgggagaccgaggcaggtggatcacgaggtcaggagacagagaccatcctggccaacacggtgaaaccctgtctctactaaaaatacaaaaaattagccgggcgtggtggcgggcgcctgtagtcccagctactcgggaggctgatgcagaagaatggcgtgaacccggaaggcagagcttgcagtgagccgagatcacgccactgcactccagcctgggtgacagagcgagactctggctcataaaataataataataataaataaataaaaaataaatggttttcagtaaaaaaaaaaaaaaaaaa

SEQ ID NO: 252 - DNA, 591 bp, Homo sapiens
cagaacggccgatctccagcccaagatgattccagcagtggtcttgctcttactccttttggttgaacaagcagcggccctgggagagcctcagctctgctatatcctggatgccatcctgtttctgtatggaattgtcctcaccctcctctactgtcgactgaagatccaagtgcgaaaggcagctataaccagctatgagaaatcagatggtgtttacacgggcctgagcaccaggaaccaggagacttacgagactctgaagcatgagaaaccaccacagtagctttagaatagatgcggtcatattcttctttggcttctggttcttccagccctcatggttggcatcacatatgcctgcatgccattaacaccagctggccctacccctataatgatcctgtgtcctaaattaatatacaccagtggttcctcctccctgttaaagactaatgctcagatgctgtttacggatatttatattctagtctcactctcttgtcccacccttcttctcttccccattcccaactccagctaaaatatgggaagggagaacccccaataaaactgccatggactggactc

SEQ ID NO: 253 - DNA, 2300 bp, Homo sapiens
agatgctcagccgcagacctttgggagagtaaagggggcacacccacccaccttgcctccaggctctttccttcctattcctgttctatggtggggctccattgcgagacttcagattgagaaatcagatgaagtttcaagaaaaggaaactggcaggtgacagagatgggtggagggactggggaaaggctgtttactccctcctgtctagtcggcttggtccctttagggctccggatatctttggtgacttgtccactccagtgtggcatcatgtggcagctgctcctcccaactgctctgctacttctagtttcagctggcatgcggactgaagatctcccaaaggctgtggtgttcctggagcctcaatggtacagcgtgcttgagaaggacagtgtgactctgaagtgccagggagcctactcccctgaggacaattccacacagtggtttcacaatgagaacctcatctcaagccaggcctcgagctacttcattgacgctgccacagtcaacgacagtggagagtacaggtgccagacaaacctctccaccctcagtgacccggtgcagctagaagtccatatcggctggctgttgctccaggcccctcggtgggtgttcaaggaggaagaccctattcacctgaggtgtcacagctggaagaacactgctctgcataaggtcacatatttacagaatggcaaagacaggaagtattttcatcataattctgacttccacattccaaaagccacactcaaagatagcggctcctacttctgcagggggcttgttgggagtaaaaatgtgtcttcagagactgtgaacatcaccatcactcaaggtttggcagtgtcaaccatctcatcattctctccacctgggtaccaagtctctttctgcttggtgatggtactcctttttgcagtggacacaggactatatttctctgtgaagacaaacatttgaagctcaacaagagactggaaggaccataaacttaaatggagaaaggaccctcaagacaaatgacccccatcccatgggagtaataagagcagtggcagcagcatctctgaacatttctctggatttgcaaccccatcatcctcaggcctctctacaagcagcaggaaacatagaactcagagccagatcctttatccaactctcgatttttccttggtctccagtggaagggaaaagcccatgatcttcaagcagggaagccccagtgagtagctgcattcctagaaattgaagtttcagagctacacaaacactttttctgtcccaaccattccctcacagcaaagcaacaatacaggctagggatggtaatcctttaaacatacaaaaattgctcgtattataaattacccagtttagagggaaaaaaagaaaataattattcctaaacaaatggataagtagaattaatggttgaggcaggaccctacagagtgtgggaactgctggggatctagagaattcagtgggaccaatgaaagcatggctgagaaatagcagggtagtccaggatagtctaagggaggtgttcccatctgagcccagagataagggtgtcttcctagaacattagccgtagtggaattaacaggaaatcatgagggtgacgtagaattgagtcttccaggggactctatcagaactggaccatttccaagtatataacgatgagccctctaatgctaggagtagcaaatggtcctaggaaggggactgaggattggggtgggggtggggtggaaaagaaagtacagaacaaaccctgtgtcactgtcccaagttaagctaagtgaacagaactatctcagcatcagaatgagaaagcctgagaagaaagaaccaaccacaagcacacaggaaggaaagcgcaggaggtgaaaatgctttcttggccagggtagtaagaattagaggttaatgcagggactgtaaaaccaccttttctgcttcaatgtctagttcctgtatagctttgttcattgcatttattaaacaaatgttgtataaccaatactaaatgtactactgagcttcactgagttacgctgtgaaactttcaaatccttcttcatgtcagttccaatgaggtggggatggagaagacaattgttgcttatgaaagaaagctttagctgtctctgttttgtaagctttcagtgcaacatttcttggttccaataaagcattttacaagatcttgcatgctactcttagatagaagatggcaaaaccatggtaataaaatatgaatgataaaaaaaaa

SEQ ID NO: 254 - DNA, 2458 bp, Homo sapiens
aataagagaagtccgaggcggcttcctcctccctgcccagcaggggcggcggtcagaggcgggcagcaccccagttctccccgcacgccggcactcgcggctgctggagccccggctggctcaccccggggccgggcagaattgggctccaggtctctgacccctcccaaggatcatgccgcagccccactgacccaggagtaggggcctaagggcagggaacctggaatgggctgtgtgttctgcaagaaattggagccggtggccacggccaaggaggatgctggcctggaaggggacttcagaagctacggggcagcagaccactatgggcctgaccccactaaggcccggcctgcatcctcatttgcccacatccccaactacagcaacttctcctctcaggccatcaaccctggcttccttgatagtggcaccatcaggggtgtgtcagggattggggtgaccctgttcattgccctgtatgactatgaggctcgaactgaggatgacctcaccttcaccaagggcgagaagttccacatcctgaacaatactgaaggtgactggtgggaggctcggtctctcagctccggaaaaactggctgcattcccagcaactacgtggcccctgttgactcaatccaagctgaagagtggtactttggaaagattgggagaaaggatgcagagaggcagctgctttcaccaggcaacccccagggggcctttctcattcgggaaagcgagaccaccaaaggtgcctactccctgtccatccgggactgggatcagaccagaggcgatcatgtgaagcattacaagatccgcaaactggacatgggcggctactacatcaccacacgggttcagttcaactcggtgcaggagctggtgcagcactacatggaggtgaatgacgggctgtgcaacctgctcatcgcgccctgcaccatcatgaagccgcagacgctgggcctggccaaggacgcctgggagatcagccgcagctccatcacgctggagcgccggctgggcaccggctgcttcggggatgtgtggctgggcacgtggaacggcagcactaaggtggcggtgaagacgctgaagccgggcaccatgtccccgaaggccttcctggaggaggcgcaggtcatgaagctgctgcggcacgacaagctggtgcagctgtacgccgtggtgtcggaggagcccatctacatcgtgaccgagttcatgtgtcacggcagcttgctggattttctcaagaacccagagggccaggatttgaggctgccccaattggtggacatggcagcccaggtagctgagggcatggcctacatggaacgcatgaactacattcaccgcgacctgagggcagccaacatcctggttggggagcggctggcgtgcaagatcgcagactttggcttggcgcgtctcatcaaggacgatgagtacaacccctgccaaggttccaagttccccatcaagtggacagccccagaagctgccctctttggcagattcaccatcaagtcagacgtgtggtcctttgggatcctgctcactgagctcatcaccaagggccgaatcccctacccaggcatgaataaacgggaagtgttggaacaggtggagcagggctaccacatgccgtgccctccaggctgcccagcatccctgtacgaggccatggaacagacctggcgtctggacccggaggagaggcctaccttcgagtacctgcagtccttcctggaggactacttcacctccgctgaaccacagtaccagcccggggatcagacatagcctgtccgggcatcaaccctctctggcggtggccaccagtccttgccaatccccagagctgttcttccaaagcccccaggctggcttagaaccccatagagtcctagcatcaccgaggacgtggctgctctgacaccacctagggcaacctacttgttttacagatggggcaaaaggaggcccagagctgatctctcatccgctctggccccaagcactatttcttccttttccacttaggcccctacatgcctgtagcctttctcactccatccccacccaaagtgctcagaccttgtctagttatttataaaactgtatgtacctccctcacttctctcctatcactgctttcctactctccttttatctcactctagtccaggtgccaagaatttcccttctaccctctattctcttgtgtctgtaagttacaaagtcaggaaaagtcttggctggacccctttcctgctgggtggatgcagtggtccaggactggggtctgggcccaggtttgagggagaaggttgcagagcacttcccacctctctgaatagtgtgtatgtgttggtttattgattctgtaaataagtaaaatgacaatatgaatcctcaaaccatgaaaaaaaaaaaaaaaaaa

SEQ ID NO: 255 - DNA, 727 bp, Homo sapiens
gaacgagggtcctagctgccgccacccgaacagcctgtcctggtgccccggctccctgccccgcgcccagtcatgaccctgcgcccctcactcctcccgctccatctgctgctgctgctgctgctcagtgcggcggtgtgccgggctgaggctgggctcgaaaccgaaagtcccgtccggaccctccaagtggagaccctggtggagcccccagaaccatgtgccgagcccgctgcttttggagacacgcttcacatacactacacgggaagcttggtagatggacgtattattgacacctccctgaccagagaccctctggttatagaacttggccaaaagcaggtgattccaggtctggagcagagtcttctcgacatgtgtgtgggagagaagcgaagggcaatcattccttctcacttggcctatggaaaacggggatttccaccatctgtcccagcggatgcagtggtgcagtatgacgtggagctgattgcactaatccgagccaactactggctaaagctggtgaagggcattttgcctctggtagggatggccatggtgccagccctcctgggcctcattgggtatcacctatacagaaaggccaatagacccaaagtctccaaaaagaagctcaaggaagagaaacgaaacaagagcaaaaagaaataataaataataaattttaaaaaacttaaaaaaaaaaaaaaaaaaaaaaaaa

SEQ ID NO: 256 - DNA, 3005 bp, Homo sapiens
ggtctggcacaggcacgcacactctcagtagactctttcactcctctctctcttcctctctcacacgttctccaacccaaggaggccagacagagggacgtggtcactctctgaaaagttcaacttgagagacaaaatgcagtggacctccctcctgctgctggcagggctcttctccctctcccaggcccagtatgaagatgaccctcattggtggttccactacctccgcagccagcagtccacctactacgatccctatgacccttacccgtatgagacctacgagccttacccctatggggtggatgaagggccagcctacacctacggctctccatcccctccagatccccgcgactgcccccaggagtgcgactgcccacccaacttccccacggccatgtactgtgacaatcgcaacctcaagtacctgcccttcgttccctcccgcatgaagtatgtgtacttccagaacaaccagatcacctccatccaggaaggcgtctttgacaatgccacagggctgctctggattgctctccacggcaaccagatcaccagtgataaggtgggcaggaaggtcttctccaagctgaggcacctggagaggctgtacctggaccacaacaacctgacccggatgcccggtcccctgcctcgatccctgagagagctccatctcgaccacaaccagatctcacgggtccccaacaatgctctggaggggctggagaacctcacggccttgtacctccaacacaatgagatccaggaagtgggcagttccatgaggggcctccggtcactgatcttgctggacctgagttataaccaccttcggaaggtgcctgatgggctgccctcagctcttgagcagctgtacatggagcacaacaatgtctacaccgtccccgatagctacttccggggggcgcccaagctgctgtatgtgcggctgtcccacaacagtctaaccaacaatggcctggcctccaacaccttcaattccagcagcctccttgagctagacctctcctacaaccagctgcagaagatccccccagtcaacaccaacctggagaacctctacctccaaggcaataggatcaatgagttctccatcagcagcttctgcaccgtggtggacgtcgtgaacttctccaagctgcaggtgctgcgcctggacgggaacgagatcaagcgcagcgccatgcctgccgacgcgcccctctgcctgcgccttgccagcctcatcgagatctgagcagccctggcaccgggtactgggcggagagcccccgtggcatttggcttgatggtttggtttggcttttgctggaaggtccaggatggaccatgtgacagaagtccacgggcaccctctgtagtcttctttcctgtaggtggggttagggggggcgatcagggacaggcagccttctgctgaggacataggcagaagctcactcttttccagggacagaagtggtggtagatggaaggatccctggatgttccaaccccataaatctcacggctcttaagttcttcccaatgatctgaggtcatggaacttcaaaagtggcatgggcaatagtatataaccatacttttctaacaatccctggctgtctgtgagcagcacttgacagctctccctctgtgctgggctggtcgtgcagttactctgggctcccatttgttgcttctcaaaatatacctcttgcccagctgcctcttctgaaatccacttcacccactccactttcctccacagatgcctcttctgtgccttaagcagagtcaggagaccccaaggcatgtgagcatctgcccagcaacctgtggagacaacccacactgtgtctgagggtgaaaggacaccaggagtcacttctatacctccctaacctcacccctggaaagccaccagattggaggtcaccagcatgatgataatattcatgacctgatgtgggaggagacagccaacctcaggcttagatcaatgtatagggctatattttggcagctgggtagctctttgaaggtggataagacttcagaagaggaaaggccagactttgcttaccatcagcatctgcaatgggccaaacacacctcaaattggctgagttgagaaagcagccccagtagttccattcttgcccagcactttctgcattccaaacagcatcctacctgggtttttatccacaaaggtagcggccacatggtttttaaagtatgagaaacacagtttgtcctctccttttatccaagcaggaagattctatatcctgatggtagagacagactccaggcagccctggacttgctagcccaaagaaggaggatgtggttaatctgtttcacctggtttgtcctaaggccatagttaaaaagtaccagctctggctggggtccgtgaagcccaggccaggcagccaaatcttgcctgtgctgggcatacaaccctctgctttcacatctctgagctatatcctcattagtgaaggtggcttttgctttatagtttggctggggagcacttaattcttcccatttcaaaaggtaatgttgcctggggcttaacccacctgccctttgggcaaggttgggacaaagccatctgggcagtcaggggcaaggactgttggaggagagttagcccaagtataggctctgcccagatgccatcacatccctgatactgtgtatgctttgaagcaccttccctgagaagggaagaggggatctttggactacgttcttggctccagacctggaatccacaaaagccaaaccagctcatttcaacaaaggagctccgatgtgaggggcaaggctgccccctgccccagggctcttcagaaagcatctgcatgtgaacaccatcatgcctttataaaggatccttattacaggaaaagcatgagtggtggctaacctgaccaataaagttattttatgattgcatctaaaaaaaaaaaaaaaaaaaa

SEQ ID NO: 257 - DNA, 7912 bp, Homo sapiens
gcccgcgccggctgtgctgcacagggggaggagagggaaccccaggcgcgagcgggaagaggggacctgcagccacaacttctctggtcctctgcatcccttctgtccctccacccgtccccttccccaccctctggcccccaccttcttggaggcgacaacccccgggaggcattagaagggatttttcccgcaggttgcgaagggaagcaaacttggtggcaacttgcctcccggtgcgggcgtctctcccccaccgtctcaacatgcttaggggtccggggcccgggctgctgctgctggccgtccagtgcctggggacagcggtgccctccacgggagcctcgaagagcaagaggcaggctcagcaaatggttcagccccagtccccggtggctgtcagtcaaagcaagcccggttgttatgacaatggaaaacactatcagataaatcaacagtgggagcggacctacctaggcaatgcgttggtttgtacttgttatggaggaagccgaggttttaactgcgagagtaaacctgaagctgaagagacttgctttgacaagtacactgggaacacttaccgagtgggtgacacttatgagcgtcctaaagactccatgatctgggactgtacctgcatcggggctgggcgagggagaataagctgtaccatcgcaaaccgctgccatgaagggggtcagtcctacaagattggtgacacctggaggagaccacatgagactggtggttacatgttagagtgtgtgtgtcttggtaatggaaaaggagaatggacctgcaagcccatagctgagaagtgttttgatcatgctgctgggacttcctatgtggtcggagaaacgtgggagaagccctaccaaggctggatgatggtagattgtacttgcctgggagaaggcagcggacgcatcacttgcacttctagaaatagatgcaacgatcaggacacaaggacatcctatagaattggagacacctggagcaagaaggataatcgaggaaacctgctccagtgcatctgcacaggcaacggccgaggagagtggaagtgtgagaggcacacctctgtgcagaccacatcgagcggatctggccccttcaccgatgttcgtgcagctgtttaccaaccgcagcctcacccccagcctcctccctatggccactgtgtcacagacagtggtgtggtctactctgtggggatgcagtggctgaagacacaaggaaataagcaaatgctttgcacgtgcctgggcaacggagtcagctgccaagagacagctgtaacccagacttacggtggcaactcaaatggagagccatgtgtcttaccattcacctacaatggcaggacgttctactcctgcaccacagaagggcgacaggacggacatctttggtgcagcacaacttcgaattatgagcaggaccagaaatactctttctgcacagaccacactgttttggttcagactcgaggaggaaattccaatggtgccttgtgccacttccccttcctatacaacaaccacaattacactgattgcacttctgagggcagaagagacaacatgaagtggtgtgggaccacacagaactatgatgccgaccagaagtttgggttctgccccatggctgcccacgaggaaatctgcacaaccaatgaaggggtcatgtaccgcattggagatcagtgggataagcagcatgacatgggtcacatgatgaggtgcacgtgtgttgggaatggtcgtggggaatggacatgcattgcctactcgcagcttcgagatcagtgcattgttgatgacatcacttacaatgtgaacgacacattccacaagcgtcatgaagaggggcacatgctgaactgtacatgcttcggtcagggtcggggcaggtggaagtgtgatcccgtcgaccaatgccaggattcagagactgggacgttttatcaaattggagattcatgggagaagtatgtgcatggtgtcagataccagtgctactgctatggccgtggcattggggagtggcattgccaacctttacagacctatccaagctcaagtggtcctgtcgaagtatttatcactgagactccgagtcagcccaactcccaccccatccagtggaatgcaccacagccatctcacatttccaagtacattctcaggtggagacctaaaaattctgtaggccgttggaaggaagctaccataccaggccacttaaactcctacaccatcaaaggcctgaagcctggtgtggtatacgagggccagctcatcagcatccagcagtacggccaccaagaagtgactcgctttgacttcaccaccaccagcaccagcacacctgtgaccagcaacaccgtgacaggagagacgactcccttttctcctcttgtggccacttctgaatctgtgaccgaaatcacagccagtagctttgtggtctcctgggtctcagcttccgacaccgtgtcgggattccgggtggaatatgagctgagtgaggagggagatgagccacagtacctggatcttccaagcacagccacttctgtgaacatccctgacctgcttcctggccgaaaatacattgtaaatgtctatcagatatctgaggatggggagcagagtttgatcctgtctacttcacaaacaacagcgcctgatgcccctcctgacccgactgtggaccaagttgatgacacctcaattgttgttcgctggagcagaccccaggctcccatcacagggtacagaatagtctattcgccatcagtagaaggtagcagcacagaactcaaccttcctgaaactgcaaactccgtcaccctcagtgacttgcaacctggtgttcagtataacatcactatctatgctgtggaagaaaatcaagaaagtacacctgttgtcattcaacaagaaaccactggcaccccacgctcagatacagtgccctctcccagggacctgcagtttgtggaagtgacagacgtgaaggtcaccatcatgtggacaccgcctgagagtgcagtgaccggctaccgtgtggatgtgatccccgtcaacctgcctggcgagcacgggcagaggctgcccatcagcaggaacacctttgcagaagtcaccgggctgtcccctggggtcacctattacttcaaagtctttgcagtgagccatgggagggagagcaagcctctgactgctcaacagacaaccaaactggatgctcccactaacctccagtttgtcaatgaaactgattctactgtcctggtgagatggactccacctcgggcccagataacaggataccgactgaccgtgggccttacccgaagaggacagcccaggcagtacaatgtgggtccctctgtctccaagtacccactgaggaatctgcagcctgcatctgagtacaccgtatccctcgtggccataaagggcaaccaagagagccccaaagccactggagtctttaccacactgcagcctgggagctctattccaccttacaacaccgaggtgactgagaccaccattgtgatcacatggacgcctgctccaagaattggttttaagctgggtgtacgaccaagccagggaggagaggcaccacgagaagtgacttcagactcaggaagcatcgttgtgtccggcttgactccaggagtagaatacgtctacaccatccaagtcctgagagatggacaggaaagagatgcgccaattgtaaacaaagtggtgacaccattgtctccaccaacaaacttgcatctggaggcaaaccctgacactggagtgctcacagtctcctgggagaggagcaccaccccagacattactggttatagaattaccacaacccctacaaacggccagcagggaaattctttggaagaagtggtccatgctgatcagagctcctgcacttttgataacctgagtcccggcctggagtacaatgtcagtgtttacactgtcaaggatgacaaggaaagtgtccctatctctgataccatcatcccagctgttcctcctcccactgacctgcgattcaccaacattggtccagacaccatgcgtgtcacctgggctccacccccatccattgatttaaccaacttcctggtgcgttactcacctgtgaaaaatgaggaagatgttgcagagttgtcaatttctccttcagacaatgcagtggtcttaacaaatctcctgcctggtacagaatatgtagtgagtgtctccagtgtctacgaacaacatgagagcacacctcttagaggaagacagaaaacaggtcttgattccccaactggcattgacttttctgatattactgccaactcttttactgtgcactggattgctcctcgagccaccatcactggctacaggatccgccatcatcccgagcacttcagtgggagacctcgagaagatcgggtgccccactctcggaattccatcaccctcaccaacctcactccaggcacagagtatgtggtcagcatcgttgctcttaatggcagagaggaaagtcccttattgattggccaacaatcaacagtttctgatgttccgagggacctggaagttgttgctgcgacccccaccagcctactgatcagctgggatgctcctgctgtcacagtgagatattacaggatcacttacggagagacaggaggaaatagccctgtccaggagttcactgtgcctgggagcaagtctacagctaccatcagcggccttaaacctggagttgattataccatcactgtgtatgctgtcactggccgtggagacagccccgcaagcagcaagccaatttccattaattaccgaacagaaattgacaaaccatcccagatgcaagtgaccgatgttcaggacaacagcattagtgtcaagtggctgccttcaagttcccctgttactggttacagagtaaccaccactcccaaaaatggaccaggaccaacaaaaactaaaactgcaggtccagatcaaacagaaatgactattgaaggcttgcagcccacagtggagtatgtggttagtgtctatgctcagaatccaagcggagagagtcagcctctggttcagactgcagtaaccactattcctgcaccaactgacctgaagttcactcaggtcacacccacaagcctgagcgcccagtggacaccacccaatgttcagctcactggatatcgagtgcgggtgacccccaaggagaagaccggaccaatgaaagaaatcaaccttgctcctgacagctcatccgtggttgtatcaggacttatggtggccaccaaatatgaagtgagtgtctatgctcttaaggacactttgacaagcagaccagctcagggagttgtcaccactctggagaatgtcagcccaccaagaagggctcgtgtgacagatgctactgagaccaccatcaccattagctggagaaccaagactgagacgatcactggcttccaagttgatgccgttccagccaatggccagactccaatccagagaaccatcaagccagatgtcagaagctacaccatcacaggtttacaaccaggcactgactacaagatctacctgtacaccttgaatgacaatgctcggagctcccctgtggtcatcgacgcctccactgccattgatgcaccatccaacctgcgtttcctggccaccacacccaattccttgctggtatcatggcagccgccacgtgccaggattaccggctacatcatcaagtatgagaagcctgggtctcctcccagagaagtggtccctcggccccgccctggtgtcacagaggctactattactggcctggaaccgggaaccgaatatacaatttatgtcattgccctgaagaataatcagaagagcgagcccctgattggaaggaaaaagacaggacaagaagctctctctcagacaaccatctcatgggccccattccaggacacttctgagtacatcatttcatgtcatcctgttggcactgatgaagaacccttacagttcagggttcctggaacttctaccagtgccactctgacaggcctcaccagaggtgccacctacaacatcatagtggaggcactgaaagaccagcagaggcataaggttcgggaagaggttgttaccgtgggcaactctgtcaacgaaggcttgaaccaacctacggatgactcgtgctttgacccctacacagtttcccattatgccgttggagatgagtgggaacgaatgtctgaatcaggctttaaactgttgtgccagtgcttaggctttggaagtggtcatttcagatgtgattcatctagatggtgccatgacaatggtgtgaactacaagattggagagaagtgggaccgtcagggagaaaatggccagatgatgagctgcacatgtcttgggaacggaaaaggagaattcaagtgtgaccctcatgaggcaacgtgttatgatgatgggaagacataccacgtaggagaacagtggcagaaggaatatctcggtgccatttgctcctgcacatgctttggaggccagcggggctggcgctgtgacaactgccgcagacctgggggtgaacccagtcccgaaggcactactggccagtcctacaaccagtattctcagagataccatcagagaacaaacactaatgttaattgcccaattgagtgcttcatgcctttagatgtacaggctgacagagaagattcccgagagtaaatcatctttccaatccagaggaacaagcatgtctctctgccaagatccatctaaactggagtgatgttagcagacccagcttagagttcttctttctttcttaagccctttgctctggaggaagttctccagcttcagctcaactcacagcttctccaagcatcaccctgggagtttcctgagggttttctcataaatgagggctgcacattgcctgttctgcttcgaagtattcaataccgctcagtattttaaatgaagtgattctaagatttggtttgggatcaataggaaagcatatgcagccaaccaagatgcaaatgttttgaaatgatatgaccaaaattttaagtaggaaagtcacccaaacacttctgctttcacttaagtgtctggcccgcaatactgtaggaacaagcatgatcttgttactgtgatattttaaatatccacagtactcactttttccaaatgatcctagtaattgcctagaaatatctttctcttacctgttatttatcaatttttcccagtatttttatacggaaaaaattgtattgaaaacacttagtatgcagttgataagaggaatttggtataattatggtgggtgattattttttatactgtatgtgccaaagctttactactgtggaaagacaactgttttaataaaagatttacattccacaacttgaagttcatctatttgatataagacaccttcgggggaaataattcctgtgaatattctttttcaattcagcaaacatttgaaaatctatgatgtgcaagtctaattgttgatttcagtacaagattttctaaatcagttgctacaaaaactgattggtttttgtcacttcatctcttcactaatggagatagctttacactttctgctttaatagatttaagtggaccccaatatttattaaaattgctagtttaccgttcagaagtataatagaaataatctttagttgctcttttctaaccattgtaattcttcccttcttccctccacctttccttcattgaataaacctctgttcaaagagattgcctgcaagggaaataaaaatgactaagatattaaaaaaaaaaaaaaaaaa

SEQ ID NO: 258 - DNA, 8647 bp, Homo sapiens
gcccgcgccggctgtgctgcacagggggaggagagggaaccccaggcgcgagcgggaagaggggacctgcagccacaacttctctggtcctctgcatcccttctgtccctccacccgtccccttccccaccctctggcccccaccttcttggaggcgacaacccccgggaggcattagaagggatttttcccgcaggttgcgaagggaagcaaacttggtggcaacttgcctcccggtgcgggcgtctctcccccaccgtctcaacatgcttaggggtccggggcccgggctgctgctgctggccgtccagtgcctggggacagcggtgccctccacgggagcctcgaagagcaagaggcaggctcagcaaatggttcagccccagtccccggtggctgtcagtcaaagcaagcccggttgttatgacaatggaaaacactatcagataaatcaacagtgggagcggacctacctaggcaatgcgttggtttgtacttgttatggaggaagccgaggttttaactgcgagagtaaacctgaagctgaagagacttgctttgacaagtacactgggaacacttaccgagtgggtgacacttatgagcgtcctaaagactccatgatctgggactgtacctgcatcggggctgggcgagggagaataagctgtaccatcgcaaaccgctgccatgaagggggtcagtcctacaagattggtgacacctggaggagaccacatgagactggtggttacatgttagagtgtgtgtgtcttggtaatggaaaaggagaatggacctgcaagcccatagctgagaagtgttttgatcatgctgctgggacttcctatgtggtcggagaaacgtgggagaagccctaccaaggctggatgatggtagattgtacttgcctgggagaaggcagcggacgcatcacttgcacttctagaaatagatgcaacgatcaggacacaaggacatcctatagaattggagacacctggagcaagaaggataatcgaggaaacctgctccagtgcatctgcacaggcaacggccgaggagagtggaagtgtgagaggcacacctctgtgcagaccacatcgagcggatctggccccttcaccgatgttcgtgcagctgtttaccaaccgcagcctcacccccagcctcctccctatggccactgtgtcacagacagtggtgtggtctactctgtggggatgcagtggctgaagacacaaggaaataagcaaatgctttgcacgtgcctgggcaacggagtcagctgccaagagacagctgtaacccagacttacggtggcaactcaaatggagagccatgtgtcttaccattcacctacaatggcaggacgttctactcctgcaccacagaagggcgacaggacggacatctttggtgcagcacaacttcgaattatgagcaggaccagaaatactctttctgcacagaccacactgttttggttcagactcgaggaggaaattccaatggtgccttgtgccacttccccttcctatacaacaaccacaattacactgattgcacttctgagggcagaagagacaacatgaagtggtgtgggaccacacagaactatgatgccgaccagaagtttgggttctgccccatggctgcccacgaggaaatctgcacaaccaatgaaggggtcatgtaccgcattggagatcagtgggataagcagcatgacatgggtcacatgatgaggtgcacgtgtgttgggaatggtcgtggggaatggacatgcattgcctactcgcagcttcgagatcagtgcattgttgatgacatcacttacaatgtgaacgacacattccacaagcgtcatgaagaggggcacatgctgaactgtacatgcttcggtcagggtcggggcaggtggaagtgtgatcccgtcgaccaatgccaggattcagagactgggacgttttatcaaattggagattcatgggagaagtatgtgcatggtgtcagataccagtgctactgctatggccgtggcattggggagtggcattgccaacctttacagacctatccaagctcaagtggtcctgtcgaagtatttatcactgagactccgagtcagcccaactcccaccccatccagtggaatgcaccacagccatctcacatttccaagtacattctcaggtggagacctaaaaattctgtaggccgttggaaggaagctaccataccaggccacttaaactcctacaccatcaaaggcctgaagcctggtgtggtatacgagggccagctcatcagcatccagcagtacggccaccaagaagtgactcgctttgacttcaccaccaccagcaccagcacacctgtgaccagcaacaccgtgacaggagagacgactcccttttctcctcttgtggccacttctgaatctgtgaccgaaatcacagccagtagctttgtggtctcctgggtctcagcttccgacaccgtgtcgggattccgggtggaatatgagctgagtgaggagggagatgagccacagtacctggatcttccaagcacagccacttctgtgaacatccctgacctgcttcctggccgaaaatacattgtaaatgtctatcagatatctgaggatggggagcagagtttgatcctgtctacttcacaaacaacagcgcctgatgcccctcctgacccgactgtggaccaagttgatgacacctcaattgttgttcgctggagcagaccccaggctcccatcacagggtacagaatagtctattcgccatcagtagaaggtagcagcacagaactcaaccttcctgaaactgcaaactccgtcaccctcagtgacttgcaacctggtgttcagtataacatcactatctatgctgtggaagaaaatcaagaaagtacacctgttgtcattcaacaagaaaccactggcaccccacgctcagatacagtgccctctcccagggacctgcagtttgtggaagtgacagacgtgaaggtcaccatcatgtggacaccgcctgagagtgcagtgaccggctaccgtgtggatgtgatccccgtcaacctgcctggcgagcacgggcagaggctgcccatcagcaggaacacctttgcagaagtcaccgggctgtcccctggggtcacctattacttcaaagtctttgcagtgagccatgggagggagagcaagcctctgactgctcaacagacaaccaaactggatgctcccactaacctccagtttgtcaatgaaactgattctactgtcctggtgagatggactccacctcgggcccagataacaggataccgactgaccgtgggccttacccgaagaggacagcccaggcagtacaatgtgggtccctctgtctccaagtacccactgaggaatctgcagcctgcatctgagtacaccgtatccctcgtggccataaagggcaaccaagagagccccaaagccactggagtctttaccacactgcagcctgggagctctattccaccttacaacaccgaggtgactgagaccaccattgtgatcacatggacgcctgctccaagaattggttttaagctgggtgtacgaccaagccagggaggagaggcaccacgagaagtgacttcagactcaggaagcatcgttgtgtccggcttgactccaggagtagaatacgtctacaccatccaagtcctgagagatggacaggaaagagatgcgccaattgtaaacaaagtggtgacaccattgtctccaccaacaaacttgcatctggaggcaaaccctgacactggagtgctcacagtctcctgggagaggagcaccaccccagacattactggttatagaattaccacaacccctacaaacggccagcagggaaattctttggaagaagtggtccatgctgatcagagctcctgcacttttgataacctgagtcccggcctggagtacaatgtcagtgtttacactgtcaaggatgacaaggaaagtgtccctatctctgataccatcatcccagaggtgccccaactcactgacctaagctttgttgatataaccgattcaagcatcggcctgaggtggaccccgctaaactcttccaccattattgggtaccgcatcacagtagttgcggcaggagaaggtatccctatttttgaagattttgtggactcctcagtaggatactacacagtcacagggctggagccgggcattgactatgatatcagcgttatcactctcattaatggcggcgagagtgcccctactacactgacacaacaaacggctgttcctcctcccactgacctgcgattcaccaacattggtccagacaccatgcgtgtcacctgggctccacccccatccattgatttaaccaacttcctggtgcgttactcacctgtgaaaaatgaggaagatgttgcagagttgtcaatttctccttcagacaatgcagtggtcttaacaaatctcctgcctggtacagaatatgtagtgagtgtctccagtgtctacgaacaacatgagagcacacctcttagaggaagacagaaaacaggtcttgattccccaactggcattgacttttctgatattactgccaactcttttactgtgcactggattgctcctcgagccaccatcactggctacaggatccgccatcatcccgagcacttcagtgggagacctcgagaagatcgggtgccccactctcggaattccatcaccctcaccaacctcactccaggcacagagtatgtggtcagcatcgttgctcttaatggcagagaggaaagtcccttattgattggccaacaatcaacagtttctgatgttccgagggacctggaagttgttgctgcgacccccaccagcctactgatcagctgggatgctcctgctgtcacagtgagatattacaggatcacttacggagagacaggaggaaatagccctgtccaggagttcactgtgcctgggagcaagtctacagctaccatcagcggccttaaacctggagttgattataccatcactgtgtatgctgtcactggccgtggagacagccccgcaagcagcaagccaatttccattaattaccgaacagaaattgacaaaccatcccagatgcaagtgaccgatgttcaggacaacagcattagtgtcaagtggctgccttcaagttcccctgttactggttacagagtaaccaccactcccaaaaatggaccaggaccaacaaaaactaaaactgcaggtccagatcaaacagaaatgactattgaaggcttgcagcccacagtggagtatgtggttagtgtctatgctcagaatccaagcggagagagtcagcctctggttcagactgcagtaaccaacattgatcgccctaaaggactggcattcactgatgtggatgtcgattccatcaaaattgcttgggaaagcccacaggggcaagtttccaggtacagggtgacctactcgagccctgaggatggaatccatgagctattccctgcacctgatggtgaagaagacactgcagagctgcaaggcctcagaccgggttctgagtacacagtcagtgtggttgccttgcacgatgatatggagagccagcccctgattggaacccagtccacagctattcctgcaccaactgacctgaagttcactcaggtcacacccacaagcctgagcgcccagtggacaccacccaatgttcagctcactggatatcgagtgcgggtgacccccaaggagaagaccggaccaatgaaagaaatcaaccttgctcctgacagctcatccgtggttgtatcaggacttatggtggccaccaaatatgaagtgagtgtctatgctcttaaggacactttgacaagcagaccagctcagggagttgtcaccactctggagaatgtcagcccaccaagaagggctcgtgtgacagatgctactgagaccaccatcaccattagctggagaaccaagactgagacgatcactggcttccaagttgatgccgttccagccaatggccagactccaatccagagaaccatcaagccagatgtcagaagctacaccatcacaggtttacaaccaggcactgactacaagatctacctgtacaccttgaatgacaatgctcggagctcccctgtggtcatcgacgcctccactgccattgatgcaccatccaacctgcgtttcctggccaccacacccaattccttgctggtatcatggcagccgccacgtgccaggattaccggctacatcatcaagtatgagaagcctgggtctcctcccagagaagtggtccctcggccccgccctggtgtcacagaggctactattactggcctggaaccgggaaccgaatatacaatttatgtcattgccctgaagaataatcagaagagcgagcccctgattggaaggaaaaagacagttcaaaagacccctttcgtcacccaccctgggtatgacactggaaatggtattcagcttcctggcacttctggtcagcaacccagtgttgggcaacaaatgatctttgaggaacatggttttaggcggaccacaccgcccacaacggccacccccataaggcataggccaagaccatacccgccgaatgtaggacaagaagctctctctcagacaaccatctcatgggccccattccaggacacttctgagtacatcatttcatgtcatcctgttggcactgatgaagaacccttacagttcagggttcctggaacttctaccagtgccactctgacaggcctcaccagaggtgccacctacaacatcatagtggaggcactgaaagaccagcagaggcataaggttcgggaagaggttgttaccgtgggcaactctgtcaacgaaggcttgaaccaacctacggatgactcgtgctttgacccctacacagtttcccattatgccgttggagatgagtgggaacgaatgtctgaatcaggctttaaactgttgtgccagtgcttaggctttggaagtggtcatttcagatgtgattcatctagatggtgccatgacaatggtgtgaactacaagattggagagaagtgggaccgtcagggagaaaatggccagatgatgagctgcacatgtcttgggaacggaaaaggagaattcaagtgtgaccctcatgaggcaacgtgttatgatgatgggaagacataccacgtaggagaacagtggcagaaggaatatctcggtgccatttgctcctgcacatgctttggaggccagcggggctggcgctgtgacaactgccgcagacctgggggtgaacccagtcccgaaggcactactggccagtcctacaaccagtattctcagagataccatcagagaacaaacactaatgttaattgcccaattgagtgcttcatgcctttagatgtacaggctgacagagaagattcccgagagtaaatcatctttccaatccagaggaacaagcatgtctctctgccaagatccatctaaactggagtgatgttagcagacccagcttagagttcttctttctttcttaagccctttgctctggaggaagttctccagcttcagctcaactcacagcttctccaagcatcaccctgggagtttcctgagggttttctcataaatgagggctgcacattgcctgttctgcttcgaagtattcaataccgctcagtattttaaatgaagtgattctaagatttggtttgggatcaataggaaagcatatgcagccaaccaagatgcaaatgttttgaaatgatatgaccaaaattttaagtaggaaagtcacccaaacacttctgctttcacttaagtgtctggcccgcaatactgtaggaacaagcatgatcttgttactgtgatattttaaatatccacagtactcactttttccaaatgatcctagtaattgcctagaaatatctttctcttacctgttatttatcaatttttcccagtatttttatacggaaaaaattgtattgaaaacacttagtatgcagttgataagaggaatttggtataattatggtgggtgattattttttatactgtatgtgccaaagctttactactgtggaaagacaactgttttaataaaagatttacattccacaacttgaagttcatctatttgatataagacaccttcgggggaaataattcctgtgaatattctttttcaattcagcaaacatttgaaaatctatgatgtgcaagtctaattgttgatttcagtacaagattttctaaatcagttgctacaaaaactgattggtttttgtcacttcatctcttcactaatggagatagctttacactttctgctttaatagatttaagtggaccccaatatttattaaaattgctagtttaccgttcagaagtataatagaaataatctttagttgctcttttctaaccattgtaattcttcccttcttccctccacctttccttcattgaataaacctctgttcaaagagattgcctgcaagggaaataaaaatgactaagatattaaaaaaaaaaaaaaaaaa

SEQ ID NO: 259 - DNA, 8374 bp, Homo sapiens
gcccgcgccggctgtgctgcacagggggaggagagggaaccccaggcgcgagcgggaagaggggacctgcagccacaacttctctggtcctctgcatcccttctgtccctccacccgtccccttccccaccctctggcccccaccttcttggaggcgacaacccccgggaggcattagaagggatttttcccgcaggttgcgaagggaagcaaacttggtggcaacttgcctcccggtgcgggcgtctctcccccaccgtctcaacatgcttaggggtccggggcccgggctgctgctgctggccgtccagtgcctggggacagcggtgccctccacgggagcctcgaagagcaagaggcaggctcagcaaatggttcagccccagtccccggtggctgtcagtcaaagcaagcccggttgttatgacaatggaaaacactatcagataaatcaacagtgggagcggacctacctaggcaatgcgttggtttgtacttgttatggaggaagccgaggttttaactgcgagagtaaacctgaagctgaagagacttgctttgacaagtacactgggaacacttaccgagtgggtgacacttatgagcgtcctaaagactccatgatctgggactgtacctgcatcggggctgggcgagggagaataagctgtaccatcgcaaaccgctgccatgaagggggtcagtcctacaagattggtgacacctggaggagaccacatgagactggtggttacatgttagagtgtgtgtgtcttggtaatggaaaaggagaatggacctgcaagcccatagctgagaagtgttttgatcatgctgctgggacttcctatgtggtcggagaaacgtgggagaagccctaccaaggctggatgatggtagattgtacttgcctgggagaaggcagcggacgcatcacttgcacttctagaaatagatgcaacgatcaggacacaaggacatcctatagaattggagacacctggagcaagaaggataatcgaggaaacctgctccagtgcatctgcacaggcaacggccgaggagagtggaagtgtgagaggcacacctctgtgcagaccacatcgagcggatctggccccttcaccgatgttcgtgcagctgtttaccaaccgcagcctcacccccagcctcctccctatggccactgtgtcacagacagtggtgtggtctactctgtggggatgcagtggctgaagacacaaggaaataagcaaatgctttgcacgtgcctgggcaacggagtcagctgccaagagacagctgtaacccagacttacggtggcaactcaaatggagagccatgtgtcttaccattcacctacaatggcaggacgttctactcctgcaccacagaagggcgacaggacggacatctttggtgcagcacaacttcgaattatgagcaggaccagaaatactctttctgcacagaccacactgttttggttcagactcgaggaggaaattccaatggtgccttgtgccacttccccttcctatacaacaaccacaattacactgattgcacttctgagggcagaagagacaacatgaagtggtgtgggaccacacagaactatgatgccgaccagaagtttgggttctgccccatggctgcccacgaggaaatctgcacaaccaatgaaggggtcatgtaccgcattggagatcagtgggataagcagcatgacatgggtcacatgatgaggtgcacgtgtgttgggaatggtcgtggggaatggacatgcattgcctactcgcagcttcgagatcagtgcattgttgatgacatcacttacaatgtgaacgacacattccacaagcgtcatgaagaggggcacatgctgaactgtacatgcttcggtcagggtcggggcaggtggaagtgtgatcccgtcgaccaatgccaggattcagagactgggacgttttatcaaattggagattcatgggagaagtatgtgcatggtgtcagataccagtgctactgctatggccgtggcattggggagtggcattgccaacctttacagacctatccaagctcaagtggtcctgtcgaagtatttatcactgagactccgagtcagcccaactcccaccccatccagtggaatgcaccacagccatctcacatttccaagtacattctcaggtggagacctaaaaattctgtaggccgttggaaggaagctaccataccaggccacttaaactcctacaccatcaaaggcctgaagcctggtgtggtatacgagggccagctcatcagcatccagcagtacggccaccaagaagtgactcgctttgacttcaccaccaccagcaccagcacacctgtgaccagcaacaccgtgacaggagagacgactcccttttctcctcttgtggccacttctgaatctgtgaccgaaatcacagccagtagctttgtggtctcctgggtctcagcttccgacaccgtgtcgggattccgggtggaatatgagctgagtgaggagggagatgagccacagtacctggatcttccaagcacagccacttctgtgaacatccctgacctgcttcctggccgaaaatacattgtaaatgtctatcagatatctgaggatggggagcagagtttgatcctgtctacttcacaaacaacagcgcctgatgcccctcctgacccgactgtggaccaagttgatgacacctcaattgttgttcgctggagcagaccccaggctcccatcacagggtacagaatagtctattcgccatcagtagaaggtagcagcacagaactcaaccttcctgaaactgcaaactccgtcaccctcagtgacttgcaacctggtgttcagtataacatcactatctatgctgtggaagaaaatcaagaaagtacacctgttgtcattcaacaagaaaccactggcaccccacgctcagatacagtgccctctcccagggacctgcagtttgtggaagtgacagacgtgaaggtcaccatcatgtggacaccgcctgagagtgcagtgaccggctaccgtgtggatgtgatccccgtcaacctgcctggcgagcacgggcagaggctgcccatcagcaggaacacctttgcagaagtcaccgggctgtcccctggggtcacctattacttcaaagtctttgcagtgagccatgggagggagagcaagcctctgactgctcaacagacaaccaaactggatgctcccactaacctccagtttgtcaatgaaactgattctactgtcctggtgagatggactccacctcgggcccagataacaggataccgactgaccgtgggccttacccgaagaggacagcccaggcagtacaatgtgggtccctctgtctccaagtacccactgaggaatctgcagcctgcatctgagtacaccgtatccctcgtggccataaagggcaaccaagagagccccaaagccactggagtctttaccacactgcagcctgggagctctattccaccttacaacaccgaggtgactgagaccaccattgtgatcacatggacgcctgctccaagaattggttttaagctgggtgtacgaccaagccagggaggagaggcaccacgagaagtgacttcagactcaggaagcatcgttgtgtccggcttgactccaggagtagaatacgtctacaccatccaagtcctgagagatggacaggaaagagatgcgccaattgtaaacaaagtggtgacaccattgtctccaccaacaaacttgcatctggaggcaaaccctgacactggagtgctcacagtctcctgggagaggagcaccaccccagacattactggttatagaattaccacaacccctacaaacggccagcagggaaattctttggaagaagtggtccatgctgatcagagctcctgcacttttgataacctgagtcccggcctggagtacaatgtcagtgtttacactgtcaaggatgacaaggaaagtgtccctatctctgataccatcatcccagctgttcctcctcccactgacctgcgattcaccaacattggtccagacaccatgcgtgtcacctgggctccacccccatccattgatttaaccaacttcctggtgcgttactcacctgtgaaaaatgaggaagatgttgcagagttgtcaatttctccttcagacaatgcagtggtcttaacaaatctcctgcctggtacagaatatgtagtgagtgtctccagtgtctacgaacaacatgagagcacacctcttagaggaagacagaaaacaggtcttgattccccaactggcattgacttttctgatattactgccaactcttttactgtgcactggattgctcctcgagccaccatcactggctacaggatccgccatcatcccgagcacttcagtgggagacctcgagaagatcgggtgccccactctcggaattccatcaccctcaccaacctcactccaggcacagagtatgtggtcagcatcgttgctcttaatggcagagaggaaagtcccttattgattggccaacaatcaacagtttctgatgttccgagggacctggaagttgttgctgcgacccccaccagcctactgatcagctgggatgctcctgctgtcacagtgagatattacaggatcacttacggagagacaggaggaaatagccctgtccaggagttcactgtgcctgggagcaagtctacagctaccatcagcggccttaaacctggagttgattataccatcactgtgtatgctgtcactggccgtggagacagccccgcaagcagcaagccaatttccattaattaccgaacagaaattgacaaaccatcccagatgcaagtgaccgatgttcaggacaacagcattagtgtcaagtggctgccttcaagttcccctgttactggttacagagtaaccaccactcccaaaaatggaccaggaccaacaaaaactaaaactgcaggtccagatcaaacagaaatgactattgaaggcttgcagcccacagtggagtatgtggttagtgtctatgctcagaatccaagcggagagagtcagcctctggttcagactgcagtaaccaacattgatcgccctaaaggactggcattcactgatgtggatgtcgattccatcaaaattgcttgggaaagcccacaggggcaagtttccaggtacagggtgacctactcgagccctgaggatggaatccatgagctattccctgcacctgatggtgaagaagacactgcagagctgcaaggcctcagaccgggttctgagtacacagtcagtgtggttgccttgcacgatgatatggagagccagcccctgattggaacccagtccacagctattcctgcaccaactgacctgaagttcactcaggtcacacccacaagcctgagcgcccagtggacaccacccaatgttcagctcactggatatcgagtgcgggtgacccccaaggagaagaccggaccaatgaaagaaatcaaccttgctcctgacagctcatccgtggttgtatcaggacttatggtggccaccaaatatgaagtgagtgtctatgctcttaaggacactttgacaagcagaccagctcagggagttgtcaccactctggagaatgtcagcccaccaagaagggctcgtgtgacagatgctactgagaccaccatcaccattagctggagaaccaagactgagacgatcactggcttccaagttgatgccgttccagccaatggccagactccaatccagagaaccatcaagccagatgtcagaagctacaccatcacaggtttacaaccaggcactgactacaagatctacctgtacaccttgaatgacaatgctcggagctcccctgtggtcatcgacgcctccactgccattgatgcaccatccaacctgcgtttcctggccaccacacccaattccttgctggtatcatggcagccgccacgtgccaggattaccggctacatcatcaagtatgagaagcctgggtctcctcccagagaagtggtccctcggccccgccctggtgtcacagaggctactattactggcctggaaccgggaaccgaatatacaatttatgtcattgccctgaagaataatcagaagagcgagcccctgattggaaggaaaaagacagttcaaaagacccctttcgtcacccaccctgggtatgacactggaaatggtattcagcttcctggcacttctggtcagcaacccagtgttgggcaacaaatgatctttgaggaacatggttttaggcggaccacaccgcccacaacggccacccccataaggcataggccaagaccatacccgccgaatgtaggacaagaagctctctctcagacaaccatctcatgggccccattccaggacacttctgagtacatcatttcatgtcatcctgttggcactgatgaagaacccttacagttcagggttcctggaacttctaccagtgccactctgacaggcctcaccagaggtgccacctacaacatcatagtggaggcactgaaagaccagcagaggcataaggttcgggaagaggttgttaccgtgggcaactctgtcaacgaaggcttgaaccaacctacggatgactcgtgctttgacccctacacagtttcccattatgccgttggagatgagtgggaacgaatgtctgaatcaggctttaaactgttgtgccagtgcttaggctttggaagtggtcatttcagatgtgattcatctagatggtgccatgacaatggtgtgaactacaagattggagagaagtgggaccgtcagggagaaaatggccagatgatgagctgcacatgtcttgggaacggaaaaggagaattcaagtgtgaccctcatgaggcaacgtgttatgatgatgggaagacataccacgtaggagaacagtggcagaaggaatatctcggtgccatttgctcctgcacatgctttggaggccagcggggctggcgctgtgacaactgccgcagacctgggggtgaacccagtcccgaaggcactactggccagtcctacaaccagtattctcagagataccatcagagaacaaacactaatgttaattgcccaattgagtgcttcatgcctttagatgtacaggctgacagagaagattcccgagagtaaatcatctttccaatccagaggaacaagcatgtctctctgccaagatccatctaaactggagtgatgttagcagacccagcttagagttcttctttctttcttaagccctttgctctggaggaagttctccagcttcagctcaactcacagcttctccaagcatcaccctgggagtttcctgagggttttctcataaatgagggctgcacattgcctgttctgcttcgaagtattcaataccgctcagtattttaaatgaagtgattctaagatttggtttgggatcaataggaaagcatatgcagccaaccaagatgcaaatgttttgaaatgatatgaccaaaattttaagtaggaaagtcacccaaacacttctgctttcacttaagtgtctggcccgcaatactgtaggaacaagcatgatcttgttactgtgatattttaaatatccacagtactcactttttccaaatgatcctagtaattgcctagaaatatctttctcttacctgttatttatcaatttttcccagtatttttatacggaaaaaattgtattgaaaacacttagtatgcagttgataagaggaatttggtataattatggtgggtgattattttttatactgtatgtgccaaagctttactactgtggaaagacaactgttttaataaaagatttacattccacaacttgaagttcatctatttgatataagacaccttcgggggaaataattcctgtgaatattctttttcaattcagcaaacatttgaaaatctatgatgtgcaagtctaattgttgatttcagtacaagattttctaaatcagttgctacaaaaactgattggtttttgtcacttcatctcttcactaatggagatagctttacactttctgctttaatagatttaagtggaccccaatatttattaaaattgctagtttaccgttcagaagtataatagaaataatctttagttgctcttttctaaccattgtaattcttcccttcttccctccacctttccttcattgaataaacctctgttcaaagagattgcctgcaagggaaataaaaatgactaagatattaaaaaaaaaaaaaaaaaa

SEQ ID NO: 260 - DNA, 8272 bp, Homo sapiens
gcccgcgccggctgtgctgcacagggggaggagagggaaccccaggcgcgagcgggaagaggggacctgcagccacaacttctctggtcctctgcatcccttctgtccctccacccgtccccttccccaccctctggcccccaccttcttggaggcgacaacccccgggaggcattagaagggatttttcccgcaggttgcgaagggaagcaaacttggtggcaacttgcctcccggtgcgggcgtctctcccccaccgtctcaacatgcttaggggtccggggcccgggctgctgctgctggccgtccagtgcctggggacagcggtgccctccacgggagcctcgaagagcaagaggcaggctcagcaaatggttcagccccagtccccggtggctgtcagtcaaagcaagcccggttgttatgacaatggaaaacactatcagataaatcaacagtgggagcggacctacctaggcaatgcgttggtttgtacttgttatggaggaagccgaggttttaactgcgagagtaaacctgaagctgaagagacttgctttgacaagtacactgggaacacttaccgagtgggtgacacttatgagcgtcctaaagactccatgatctgggactgtacctgcatcggggctgggcgagggagaataagctgtaccatcgcaaaccgctgccatgaagggggtcagtcctacaagattggtgacacctggaggagaccacatgagactggtggttacatgttagagtgtgtgtgtcttggtaatggaaaaggagaatggacctgcaagcccatagctgagaagtgttttgatcatgctgctgggacttcctatgtggtcggagaaacgtgggagaagccctaccaaggctggatgatggtagattgtacttgcctgggagaaggcagcggacgcatcacttgcacttctagaaatagatgcaacgatcaggacacaaggacatcctatagaattggagacacctggagcaagaaggataatcgaggaaacctgctccagtgcatctgcacaggcaacggccgaggagagtggaagtgtgagaggcacacctctgtgcagaccacatcgagcggatctggccccttcaccgatgttcgtgcagctgtttaccaaccgcagcctcacccccagcctcctccctatggccactgtgtcacagacagtggtgtggtctactctgtggggatgcagtggctgaagacacaaggaaataagcaaatgctttgcacgtgcctgggcaacggagtcagctgccaagagacagctgtaacccagacttacggtggcaactcaaatggagagccatgtgtcttaccattcacctacaatggcaggacgttctactcctgcaccacagaagggcgacaggacggacatctttggtgcagcacaacttcgaattatgagcaggaccagaaatactctttctgcacagaccacactgttttggttcagactcgaggaggaaattccaatggtgccttgtgccacttccccttcctatacaacaaccacaattacactgattgcacttctgagggcagaagagacaacatgaagtggtgtgggaccacacagaactatgatgccgaccagaagtttgggttctgccccatggctgcccacgaggaaatctgcacaaccaatgaaggggtcatgtaccgcattggagatcagtgggataagcagcatgacatgggtcacatgatgaggtgcacgtgtgttgggaatggtcgtggggaatggacatgcattgcctactcgcagcttcgagatcagtgcattgttgatgacatcacttacaatgtgaacgacacattccacaagcgtcatgaagaggggcacatgctgaactgtacatgcttcggtcagggtcggggcaggtggaagtgtgatcccgtcgaccaatgccaggattcagagactgggacgttttatcaaattggagattcatgggagaagtatgtgcatggtgtcagataccagtgctactgctatggccgtggcattggggagtggcattgccaacctttacagacctatccaagctcaagtggtcctgtcgaagtatttatcactgagactccgagtcagcccaactcccaccccatccagtggaatgcaccacagccatctcacatttccaagtacattctcaggtggagacctaaaaattctgtaggccgttggaaggaagctaccataccaggccacttaaactcctacaccatcaaaggcctgaagcctggtgtggtatacgagggccagctcatcagcatccagcagtacggccaccaagaagtgactcgctttgacttcaccaccaccagcaccagcacacctgtgaccagcaacaccgtgacaggagagacgactcccttttctcctcttgtggccacttctgaatctgtgaccgaaatcacagccagtagctttgtggtctcctgggtctcagcttccgacaccgtgtcgggattccgggtggaatatgagctgagtgaggagggagatgagccacagtacctggatcttccaagcacagccacttctgtgaacatccctgacctgcttcctggccgaaaatacattgtaaatgtctatcagatatctgaggatggggagcagagtttgatcctgtctacttcacaaacaacagcgcctgatgcccctcctgacccgactgtggaccaagttgatgacacctcaattgttgttcgctggagcagaccccaggctcccatcacagggtacagaatagtctattcgccatcagtagaaggtagcagcacagaactcaaccttcctgaaactgcaaactccgtcaccctcagtgacttgcaacctggtgttcagtataacatcactatctatgctgtggaagaaaatcaagaaagtacacctgttgtcattcaacaagaaaccactggcaccccacgctcagatacagtgccctctcccagggacctgcagtttgtggaagtgacagacgtgaaggtcaccatcatgtggacaccgcctgagagtgcagtgaccggctaccgtgtggatgtgatccccgtcaacctgcctggcgagcacgggcagaggctgcccatcagcaggaacacctttgcagaagtcaccgggctgtcccctggggtcacctattacttcaaagtctttgcagtgagccatgggagggagagcaagcctctgactgctcaacagacaaccaaactggatgctcccactaacctccagtttgtcaatgaaactgattctactgtcctggtgagatggactccacctcgggcccagataacaggataccgactgaccgtgggccttacccgaagaggacagcccaggcagtacaatgtgggtccctctgtctccaagtacccactgaggaatctgcagcctgcatctgagtacaccgtatccctcgtggccataaagggcaaccaagagagccccaaagccactggagtctttaccacactgcagcctgggagctctattccaccttacaacaccgaggtgactgagaccaccattgtgatcacatggacgcctgctccaagaattggttttaagctgggtgtacgaccaagccagggaggagaggcaccacgagaagtgacttcagactcaggaagcatcgttgtgtccggcttgactccaggagtagaatacgtctacaccatccaagtcctgagagatggacaggaaagagatgcgccaattgtaaacaaagtggtgacaccattgtctccaccaacaaacttgcatctggaggcaaaccctgacactggagtgctcacagtctcctgggagaggagcaccaccccagacattactggttatagaattaccacaacccctacaaacggccagcagggaaattctttggaagaagtggtccatgctgatcagagctcctgcacttttgataacctgagtcccggcctggagtacaatgtcagtgtttacactgtcaaggatgacaaggaaagtgtccctatctctgataccatcatcccagctgttcctcctcccactgacctgcgattcaccaacattggtccagacaccatgcgtgtcacctgggctccacccccatccattgatttaaccaacttcctggtgcgttactcacctgtgaaaaatgaggaagatgttgcagagttgtcaatttctccttcagacaatgcagtggtcttaacaaatctcctgcctggtacagaatatgtagtgagtgtctccagtgtctacgaacaacatgagagcacacctcttagaggaagacagaaaacaggtcttgattccccaactggcattgacttttctgatattactgccaactcttttactgtgcactggattgctcctcgagccaccatcactggctacaggatccgccatcatcccgagcacttcagtgggagacctcgagaagatcgggtgccccactctcggaattccatcaccctcaccaacctcactccaggcacagagtatgtggtcagcatcgttgctcttaatggcagagaggaaagtcccttattgattggccaacaatcaacagtttctgatgttccgagggacctggaagttgttgctgcgacccccaccagcctactgatcagctgggatgctcctgctgtcacagtgagatattacaggatcacttacggagagacaggaggaaatagccctgtccaggagttcactgtgcctgggagcaagtctacagctaccatcagcggccttaaacctggagttgattataccatcactgtgtatgctgtcactggccgtggagacagccccgcaagcagcaagccaatttccattaattaccgaacagaaattgacaaaccatcccagatgcaagtgaccgatgttcaggacaacagcattagtgtcaagtggctgccttcaagttcccctgttactggttacagagtaaccaccactcccaaaaatggaccaggaccaacaaaaactaaaactgcaggtccagatcaaacagaaatgactattgaaggcttgcagcccacagtggagtatgtggttagtgtctatgctcagaatccaagcggagagagtcagcctctggttcagactgcagtaaccactattcctgcaccaactgacctgaagttcactcaggtcacacccacaagcctgagcgcccagtggacaccacccaatgttcagctcactggatatcgagtgcgggtgacccccaaggagaagaccggaccaatgaaagaaatcaaccttgctcctgacagctcatccgtggttgtatcaggacttatggtggccaccaaatatgaagtgagtgtctatgctcttaaggacactttgacaagcagaccagctcagggagttgtcaccactctggagaatgtcagcccaccaagaagggctcgtgtgacagatgctactgagaccaccatcaccattagctggagaaccaagactgagacgatcactggcttccaagttgatgccgttccagccaatggccagactccaatccagagaaccatcaagccagatgtcagaagctacaccatcacaggtttacaaccaggcactgactacaagatctacctgtacaccttgaatgacaatgctcggagctcccctgtggtcatcgacgcctccactgccattgatgcaccatccaacctgcgtttcctggccaccacacccaattccttgctggtatcatggcagccgccacgtgccaggattaccggctacatcatcaagtatgagaagcctgggtctcctcccagagaagtggtccctcggccccgccctggtgtcacagaggctactattactggcctggaaccgggaaccgaatatacaatttatgtcattgccctgaagaataatcagaagagcgagcccctgattggaaggaaaaagacagacgagcttccccaactggtaacccttccacaccccaatcttcatggaccagagatcttggatgttccttccacagttcaaaagacccctttcgtcacccaccctgggtatgacactggaaatggtattcagcttcctggcacttctggtcagcaacccagtgttgggcaacaaatgatctttgaggaacatggttttaggcggaccacaccgcccacaacggccacccccataaggcataggccaagaccatacccgccgaatgtaggtgaggaaatccaaattggtcacatccccagggaagatgtagactatcacctgtacccacacggtccgggactcaatccaaatgcctctacaggacaagaagctctctctcagacaaccatctcatgggccccattccaggacacttctgagtacatcatttcatgtcatcctgttggcactgatgaagaacccttacagttcagggttcctggaacttctaccagtgccactctgacaggcctcaccagaggtgccacctacaacatcatagtggaggcactgaaagaccagcagaggcataaggttcgggaagaggttgttaccgtgggcaactctgtcaacgaaggcttgaaccaacctacggatgactcgtgctttgacccctacacagtttcccattatgccgttggagatgagtgggaacgaatgtctgaatcaggctttaaactgttgtgccagtgcttaggctttggaagtggtcatttcagatgtgattcatctagatggtgccatgacaatggtgtgaactacaagattggagagaagtgggaccgtcagggagaaaatggccagatgatgagctgcacatgtcttgggaacggaaaaggagaattcaagtgtgaccctcatgaggcaacgtgttatgatgatgggaagacataccacgtaggagaacagtggcagaaggaatatctcggtgccatttgctcctgcacatgctttggaggccagcggggctggcgctgtgacaactgccgcagacctgggggtgaacccagtcccgaaggcactactggccagtcctacaaccagtattctcagagataccatcagagaacaaacactaatgttaattgcccaattgagtgcttcatgcctttagatgtacaggctgacagagaagattcccgagagtaaatcatctttccaatccagaggaacaagcatgtctctctgccaagatccatctaaactggagtgatgttagcagacccagcttagagttcttctttctttcttaagccctttgctctggaggaagttctccagcttcagctcaactcacagcttctccaagcatcaccctgggagtttcctgagggttttctcataaatgagggctgcacattgcctgttctgcttcgaagtattcaataccgctcagtattttaaatgaagtgattctaagatttggtttgggatcaataggaaagcatatgcagccaaccaagatgcaaatgttttgaaatgatatgaccaaaattttaagtaggaaagtcacccaaacacttctgctttcacttaagtgtctggcccgcaatactgtaggaacaagcatgatcttgttactgtgatattttaaatatccacagtactcactttttccaaatgatcctagtaattgcctagaaatatctttctcttacctgttatttatcaatttttcccagtatttttatacggaaaaaattgtattgaaaacacttagtatgcagttgataagaggaatttggtataattatggtgggtgattattttttatactgtatgtgccaaagctttactactgtggaaagacaactgttttaataaaagatttacattccacaacttgaagttcatctatttgatataagacaccttcgggggaaataattcctgtgaatattctttttcaattcagcaaacatttgaaaatctatgatgtgcaagtctaattgttgatttcagtacaagattttctaaatcagttgctacaaaaactgattggtttttgtcacttcatctcttcactaatggagatagctttacactttctgctttaatagatttaagtggaccccaatatttattaaaattgctagtttaccgttcagaagtataatagaaataatctttagttgctcttttctaaccattgtaattcttcccttcttccctccacctttccttcattgaataaacctctgttcaaagagattgcctgcaagggaaataaaaatgactaagatattaaaaaaaaaaaaaaaaaa

SEQ ID NO: 261 - DNA, 8815 bp, Homo sapiens
gcccgcgccggctgtgctgcacagggggaggagagggaaccccaggcgcgagcgggaagaggggacctgcagccacaacttctctggtcctctgcatcccttctgtccctccacccgtccccttccccaccctctggcccccaccttcttggaggcgacaacccccgggaggcattagaagggatttttcccgcaggttgcgaagggaagcaaacttggtggcaacttgcctcccggtgcgggcgtctctcccccaccgtctcaacatgcttaggggtccggggcccgggctgctgctgctggccgtccagtgcctggggacagcggtgccctccacgggagcctcgaagagcaagaggcaggctcagcaaatggttcagccccagtccccggtggctgtcagtcaaagcaagcccggttgttatgacaatggaaaacactatcagataaatcaacagtgggagcggacctacctaggcaatgcgttggtttgtacttgttatggaggaagccgaggttttaactgcgagagtaaacctgaagctgaagagacttgctttgacaagtacactgggaacacttaccgagtgggtgacacttatgagcgtcctaaagactccatgatctgggactgtacctgcatcggggctgggcgagggagaataagctgtaccatcgcaaaccgctgccatgaagggggtcagtcctacaagattggtgacacctggaggagaccacatgagactggtggttacatgttagagtgtgtgtgtcttggtaatggaaaaggagaatggacctgcaagcccatagctgagaagtgttttgatcatgctgctgggacttcctatgtggtcggagaaacgtgggagaagccctaccaaggctggatgatggtagattgtacttgcctgggagaaggcagcggacgcatcacttgcacttctagaaatagatgcaacgatcaggacacaaggacatcctatagaattggagacacctggagcaagaaggataatcgaggaaacctgctccagtgcatctgcacaggcaacggccgaggagagtggaagtgtgagaggcacacctctgtgcagaccacatcgagcggatctggccccttcaccgatgttcgtgcagctgtttaccaaccgcagcctcacccccagcctcctccctatggccactgtgtcacagacagtggtgtggtctactctgtggggatgcagtggctgaagacacaaggaaataagcaaatgctttgcacgtgcctgggcaacggagtcagctgccaagagacagctgtaacccagacttacggtggcaactcaaatggagagccatgtgtcttaccattcacctacaatggcaggacgttctactcctgcaccacagaagggcgacaggacggacatctttggtgcagcacaacttcgaattatgagcaggaccagaaatactctttctgcacagaccacactgttttggttcagactcgaggaggaaattccaatggtgccttgtgccacttccccttcctatacaacaaccacaattacactgattgcacttctgagggcagaagagacaacatgaagtggtgtgggaccacacagaactatgatgccgaccagaagtttgggttctgccccatggctgcccacgaggaaatctgcacaaccaatgaaggggtcatgtaccgcattggagatcagtgggataagcagcatgacatgggtcacatgatgaggtgcacgtgtgttgggaatggtcgtggggaatggacatgcattgcctactcgcagcttcgagatcagtgcattgttgatgacatcacttacaatgtgaacgacacattccacaagcgtcatgaagaggggcacatgctgaactgtacatgcttcggtcagggtcggggcaggtggaagtgtgatcccgtcgaccaatgccaggattcagagactgggacgttttatcaaattggagattcatgggagaagtatgtgcatggtgtcagataccagtgctactgctatggccgtggcattggggagtggcattgccaacctttacagacctatccaagctcaagtggtcctgtcgaagtatttatcactgagactccgagtcagcccaactcccaccccatccagtggaatgcaccacagccatctcacatttccaagtacattctcaggtggagacctaaaaattctgtaggccgttggaaggaagctaccataccaggccacttaaactcctacaccatcaaaggcctgaagcctggtgtggtatacgagggccagctcatcagcatccagcagtacggccaccaagaagtgactcgctttgacttcaccaccaccagcaccagcacacctgtgaccagcaacaccgtgacaggagagacgactcccttttctcctcttgtggccacttctgaatctgtgaccgaaatcacagccagtagctttgtggtctcctgggtctcagcttccgacaccgtgtcgggattccgggtggaatatgagctgagtgaggagggagatgagccacagtacctggatcttccaagcacagccacttctgtgaacatccctgacctgcttcctggccgaaaatacattgtaaatgtctatcagatatctgaggatggggagcagagtttgatcctgtctacttcacaaacaacagcgcctgatgcccctcctgacccgactgtggaccaagttgatgacacctcaattgttgttcgctggagcagaccccaggctcccatcacagggtacagaatagtctattcgccatcagtagaaggtagcagcacagaactcaaccttcctgaaactgcaaactccgtcaccctcagtgacttgcaacctggtgttcagtataacatcactatctatgctgtggaagaaaatcaagaaagtacacctgttgtcattcaacaagaaaccactggcaccccacgctcagatacagtgccctctcccagggacctgcagtttgtggaagtgacagacgtgaaggtcaccatcatgtggacaccgcctgagagtgcagtgaccggctaccgtgtggatgtgatccccgtcaacctgcctggcgagcacgggcagaggctgcccatcagcaggaacacctttgcagaagtcaccgggctgtcccctggggtcacctattacttcaaagtctttgcagtgagccatgggagggagagcaagcctctgactgctcaacagacaaccaaactggatgctcccactaacctccagtttgtcaatgaaactgattctactgtcctggtgagatggactccacctcgggcccagataacaggataccgactgaccgtgggccttacccgaagaggacagcccaggcagtacaatgtgggtccctctgtctccaagtacccactgaggaatctgcagcctgcatctgagtacaccgtatccctcgtggccataaagggcaaccaagagagccccaaagccactggagtctttaccacactgcagcctgggagctctattccaccttacaacaccgaggtgactgagaccaccattgtgatcacatggacgcctgctccaagaattggttttaagctgggtgtacgaccaagccagggaggagaggcaccacgagaagtgacttcagactcaggaagcatcgttgtgtccggcttgactccaggagtagaatacgtctacaccatccaagtcctgagagatggacaggaaagagatgcgccaattgtaaacaaagtggtgacaccattgtctccaccaacaaacttgcatctggaggcaaaccctgacactggagtgctcacagtctcctgggagaggagcaccaccccagacattactggttatagaattaccacaacccctacaaacggccagcagggaaattctttggaagaagtggtccatgctgatcagagctcctgcacttttgataacctgagtcccggcctggagtacaatgtcagtgtttacactgtcaaggatgacaaggaaagtgtccctatctctgataccatcatcccagaggtgccccaactcactgacctaagctttgttgatataaccgattcaagcatcggcctgaggtggaccccgctaaactcttccaccattattgggtaccgcatcacagtagttgcggcaggagaaggtatccctatttttgaagattttgtggactcctcagtaggatactacacagtcacagggctggagccgggcattgactatgatatcagcgttatcactctcattaatggcggcgagagtgcccctactacactgacacaacaaacggctgttcctcctcccactgacctgcgattcaccaacattggtccagacaccatgcgtgtcacctgggctccacccccatccattgatttaaccaacttcctggtgcgttactcacctgtgaaaaatgaggaagatgttgcagagttgtcaatttctccttcagacaatgcagtggtcttaacaaatctcctgcctggtacagaatatgtagtgagtgtctccagtgtctacgaacaacatgagagcacacctcttagaggaagacagaaaacaggtcttgattccccaactggcattgacttttctgatattactgccaactcttttactgtgcactggattgctcctcgagccaccatcactggctacaggatccgccatcatcccgagcacttcagtgggagacctcgagaagatcgggtgccccactctcggaattccatcaccctcaccaacctcactccaggcacagagtatgtggtcagcatcgttgctcttaatggcagagaggaaagtcccttattgattggccaacaatcaacagtttctgatgttccgagggacctggaagttgttgctgcgacccccaccagcctactgatcagctgggatgctcctgctgtcacagtgagatattacaggatcacttacggagagacaggaggaaatagccctgtccaggagttcactgtgcctgggagcaagtctacagctaccatcagcggccttaaacctggagttgattataccatcactgtgtatgctgtcactggccgtggagacagccccgcaagcagcaagccaatttccattaattaccgaacagaaattgacaaaccatcccagatgcaagtgaccgatgttcaggacaacagcattagtgtcaagtggctgccttcaagttcccctgttactggttacagagtaaccaccactcccaaaaatggaccaggaccaacaaaaactaaaactgcaggtccagatcaaacagaaatgactattgaaggcttgcagcccacagtggagtatgtggttagtgtctatgctcagaatccaagcggagagagtcagcctctggttcagactgcagtaaccaacattgatcgccctaaaggactggcattcactgatgtggatgtcgattccatcaaaattgcttgggaaagcccacaggggcaagtttccaggtacagggtgacctactcgagccctgaggatggaatccatgagctattccctgcacctgatggtgaagaagacactgcagagctgcaaggcctcagaccgggttctgagtacacagtcagtgtggttgccttgcacgatgatatggagagccagcccctgattggaacccagtccacagctattcctgcaccaactgacctgaagttcactcaggtcacacccacaagcctgagcgcccagtggacaccacccaatgttcagctcactggatatcgagtgcgggtgacccccaaggagaagaccggaccaatgaaagaaatcaaccttgctcctgacagctcatccgtggttgtatcaggacttatggtggccaccaaatatgaagtgagtgtctatgctcttaaggacactttgacaagcagaccagctcagggagttgtcaccactctggagaatgtcagcccaccaagaagggctcgtgtgacagatgctactgagaccaccatcaccattagctggagaaccaagactgagacgatcactggcttccaagttgatgccgttccagccaatggccagactccaatccagagaaccatcaagccagatgtcagaagctacaccatcacaggtttacaaccaggcactgactacaagatctacctgtacaccttgaatgacaatgctcggagctcccctgtggtcatcgacgcctccactgccattgatgcaccatccaacctgcgtttcctggccaccacacccaattccttgctggtatcatggcagccgccacgtgccaggattaccggctacatcatcaagtatgagaagcctgggtctcctcccagagaagtggtccctcggccccgccctggtgtcacagaggctactattactggcctggaaccgggaaccgaatatacaatttatgtcattgccctgaagaataatcagaagagcgagcccctgattggaaggaaaaagacagacgagcttccccaactggtaacccttccacaccccaatcttcatggaccagagatcttggatgttccttccacagttcaaaagacccctttcgtcacccaccctgggtatgacactggaaatggtattcagcttcctggcacttctggtcagcaacccagtgttgggcaacaaatgatctttgaggaacatggttttaggcggaccacaccgcccacaacggccacccccataaggcataggccaagaccatacccgccgaatgtaggtgaggaaatccaaattggtcacatccccagggaagatgtagactatcacctgtacccacacggtccgggactcaatccaaatgcctctacaggacaagaagctctctctcagacaaccatctcatgggccccattccaggacacttctgagtacatcatttcatgtcatcctgttggcactgatgaagaacccttacagttcagggttcctggaacttctaccagtgccactctgacaggcctcaccagaggtgccacctacaacatcatagtggaggcactgaaagaccagcagaggcataaggttcgggaagaggttgttaccgtgggcaactctgtcaacgaaggcttgaaccaacctacggatgactcgtgctttgacccctacacagtttcccattatgccgttggagatgagtgggaacgaatgtctgaatcaggctttaaactgttgtgccagtgcttaggctttggaagtggtcatttcagatgtgattcatctagatggtgccatgacaatggtgtgaactacaagattggagagaagtgggaccgtcagggagaaaatggccagatgatgagctgcacatgtcttgggaacggaaaaggagaattcaagtgtgaccctcatgaggcaacgtgttatgatgatgggaagacataccacgtaggagaacagtggcagaaggaatatctcggtgccatttgctcctgcacatgctttggaggccagcggggctggcgctgtgacaactgccgcagacctgggggtgaacccagtcccgaaggcactactggccagtcctacaaccagtattctcagagataccatcagagaacaaacactaatgttaattgcccaattgagtgcttcatgcctttagatgtacaggctgacagagaagattcccgagagtaaatcatctttccaatccagaggaacaagcatgtctctctgccaagatccatctaaactggagtgatgttagcagacccagcttagagttcttctttctttcttaagccctttgctctggaggaagttctccagcttcagctcaactcacagcttctccaagcatcaccctgggagtttcctgagggttttctcataaatgagggctgcacattgcctgttctgcttcgaagtattcaataccgctcagtattttaaatgaagtgattctaagatttggtttgggatcaataggaaagcatatgcagccaaccaagatgcaaatgttttgaaatgatatgaccaaaattttaagtaggaaagtcacccaaacacttctgctttcacttaagtgtctggcccgcaatactgtaggaacaagcatgatcttgttactgtgatattttaaatatccacagtactcactttttccaaatgatcctagtaattgcctagaaatatctttctcttacctgttatttatcaatttttcccagtatttttatacggaaaaaattgtattgaaaacacttagtatgcagttgataagaggaatttggtataattatggtgggtgattattttttatactgtatgtgccaaagctttactactgtggaaagacaactgttttaataaaagatttacattccacaacttgaagttcatctatttgatataagacaccttcgggggaaataattcctgtgaatattctttttcaattcagcaaacatttgaaaatctatgatgtgcaagtctaattgttgatttcagtacaagattttctaaatcagttgctacaaaaactgattggtttttgtcacttcatctcttcactaatggagatagctttacactttctgctttaatagatttaagtggaccccaatatttattaaaattgctagtttaccgttcagaagtataatagaaataatctttagttgctcttttctaaccattgtaattcttcccttcttccctccacctttccttcattgaataaacctctgttcaaagagattgcctgcaagggaaataaaaatgactaagatattaaaaaaaaaaaaaaaaaa

SEQ ID NO: 262 - DNA, 8449 bp, Homo sapiens
gcccgcgccggctgtgctgcacagggggaggagagggaaccccaggcgcgagcgggaagaggggacctgcagccacaacttctctggtcctctgcatcccttctgtccctccacccgtccccttccccaccctctggcccccaccttcttggaggcgacaacccccgggaggcattagaagggatttttcccgcaggttgcgaagggaagcaaacttggtggcaacttgcctcccggtgcgggcgtctctcccccaccgtctcaacatgcttaggggtccggggcccgggctgctgctgctggccgtccagtgcctggggacagcggtgccctccacgggagcctcgaagagcaagaggcaggctcagcaaatggttcagccccagtccccggtggctgtcagtcaaagcaagcccggttgttatgacaatggaaaacactatcagataaatcaacagtgggagcggacctacctaggcaatgcgttggtttgtacttgttatggaggaagccgaggttttaactgcgagagtaaacctgaagctgaagagacttgctttgacaagtacactgggaacacttaccgagtgggtgacacttatgagcgtcctaaagactccatgatctgggactgtacctgcatcggggctgggcgagggagaataagctgtaccatcgcaaaccgctgccatgaagggggtcagtcctacaagattggtgacacctggaggagaccacatgagactggtggttacatgttagagtgtgtgtgtcttggtaatggaaaaggagaatggacctgcaagcccatagctgagaagtgttttgatcatgctgctgggacttcctatgtggtcggagaaacgtgggagaagccctaccaaggctggatgatggtagattgtacttgcctgggagaaggcagcggacgcatcacttgcacttctagaaatagatgcaacgatcaggacacaaggacatcctatagaattggagacacctggagcaagaaggataatcgaggaaacctgctccagtgcatctgcacaggcaacggccgaggagagtggaagtgtgagaggcacacctctgtgcagaccacatcgagcggatctggccccttcaccgatgttcgtgcagctgtttaccaaccgcagcctcacccccagcctcctccctatggccactgtgtcacagacagtggtgtggtctactctgtggggatgcagtggctgaagacacaaggaaataagcaaatgctttgcacgtgcctgggcaacggagtcagctgccaagagacagctgtaacccagacttacggtggcaactcaaatggagagccatgtgtcttaccattcacctacaatggcaggacgttctactcctgcaccacagaagggcgacaggacggacatctttggtgcagcacaacttcgaattatgagcaggaccagaaatactctttctgcacagaccacactgttttggttcagactcgaggaggaaattccaatggtgccttgtgccacttccccttcctatacaacaaccacaattacactgattgcacttctgagggcagaagagacaacatgaagtggtgtgggaccacacagaactatgatgccgaccagaagtttgggttctgccccatggctgcccacgaggaaatctgcacaaccaatgaaggggtcatgtaccgcattggagatcagtgggataagcagcatgacatgggtcacatgatgaggtgcacgtgtgttgggaatggtcgtggggaatggacatgcattgcctactcgcagcttcgagatcagtgcattgttgatgacatcacttacaatgtgaacgacacattccacaagcgtcatgaagaggggcacatgctgaactgtacatgcttcggtcagggtcggggcaggtggaagtgtgatcccgtcgaccaatgccaggattcagagactgggacgttttatcaaattggagattcatgggagaagtatgtgcatggtgtcagataccagtgctactgctatggccgtggcattggggagtggcattgccaacctttacagacctatccaagctcaagtggtcctgtcgaagtatttatcactgagactccgagtcagcccaactcccaccccatccagtggaatgcaccacagccatctcacatttccaagtacattctcaggtggagacctaaaaattctgtaggccgttggaaggaagctaccataccaggccacttaaactcctacaccatcaaaggcctgaagcctggtgtggtatacgagggccagctcatcagcatccagcagtacggccaccaagaagtgactcgctttgacttcaccaccaccagcaccagcacacctgtgaccagcaacaccgtgacaggagagacgactcccttttctcctcttgtggccacttctgaatctgtgaccgaaatcacagccagtagctttgtggtctcctgggtctcagcttccgacaccgtgtcgggattccgggtggaatatgagctgagtgaggagggagatgagccacagtacctggatcttccaagcacagccacttctgtgaacatccctgacctgcttcctggccgaaaatacattgtaaatgtctatcagatatctgaggatggggagcagagtttgatcctgtctacttcacaaacaacagcgcctgatgcccctcctgacccgactgtggaccaagttgatgacacctcaattgttgttcgctggagcagaccccaggctcccatcacagggtacagaatagtctattcgccatcagtagaaggtagcagcacagaactcaaccttcctgaaactgcaaactccgtcaccctcagtgacttgcaacctggtgttcagtataacatcactatctatgctgtggaagaaaatcaagaaagtacacctgttgtcattcaacaagaaaccactggcaccccacgctcagatacagtgccctctcccagggacctgcagtttgtggaagtgacagacgtgaaggtcaccatcatgtggacaccgcctgagagtgcagtgaccggctaccgtgtggatgtgatccccgtcaacctgcctggcgagcacgggcagaggctgcccatcagcaggaacacctttgcagaagtcaccgggctgtcccctggggtcacctattacttcaaagtctttgcagtgagccatgggagggagagcaagcctctgactgctcaacagacaaccaaactggatgctcccactaacctccagtttgtcaatgaaactgattctactgtcctggtgagatggactccacctcgggcccagataacaggataccgactgaccgtgggccttacccgaagaggacagcccaggcagtacaatgtgggtccctctgtctccaagtacccactgaggaatctgcagcctgcatctgagtacaccgtatccctcgtggccataaagggcaaccaagagagccccaaagccactggagtctttaccacactgcagcctgggagctctattccaccttacaacaccgaggtgactgagaccaccattgtgatcacatggacgcctgctccaagaattggttttaagctgggtgtacgaccaagccagggaggagaggcaccacgagaagtgacttcagactcaggaagcatcgttgtgtccggcttgactccaggagtagaatacgtctacaccatccaagtcctgagagatggacaggaaagagatgcgccaattgtaaacaaagtggtgacaccattgtctccaccaacaaacttgcatctggaggcaaaccctgacactggagtgctcacagtctcctgggagaggagcaccaccccagacattactggttatagaattaccacaacccctacaaacggccagcagggaaattctttggaagaagtggtccatgctgatcagagctcctgcacttttgataacctgagtcccggcctggagtacaatgtcagtgtttacactgtcaaggatgacaaggaaagtgtccctatctctgataccatcatcccagctgttcctcctcccactgacctgcgattcaccaacattggtccagacaccatgcgtgtcacctgggctccacccccatccattgatttaaccaacttcctggtgcgttactcacctgtgaaaaatgaggaagatgttgcagagttgtcaatttctccttcagacaatgcagtggtcttaacaaatctcctgcctggtacagaatatgtagtgagtgtctccagtgtctacgaacaacatgagagcacacctcttagaggaagacagaaaacaggtcttgattccccaactggcattgacttttctgatattactgccaactcttttactgtgcactggattgctcctcgagccaccatcactggctacaggatccgccatcatcccgagcacttcagtgggagacctcgagaagatcgggtgccccactctcggaattccatcaccctcaccaacctcactccaggcacagagtatgtggtcagcatcgttgctcttaatggcagagaggaaagtcccttattgattggccaacaatcaacagtttctgatgttccgagggacctggaagttgttgctgcgacccccaccagcctactgatcagctgggatgctcctgctgtcacagtgagatattacaggatcacttacggagagacaggaggaaatagccctgtccaggagttcactgtgcctgggagcaagtctacagctaccatcagcggccttaaacctggagttgattataccatcactgtgtatgctgtcactggccgtggagacagccccgcaagcagcaagccaatttccattaattaccgaacagaaattgacaaaccatcccagatgcaagtgaccgatgttcaggacaacagcattagtgtcaagtggctgccttcaagttcccctgttactggttacagagtaaccaccactcccaaaaatggaccaggaccaacaaaaactaaaactgcaggtccagatcaaacagaaatgactattgaaggcttgcagcccacagtggagtatgtggttagtgtctatgctcagaatccaagcggagagagtcagcctctggttcagactgcagtaaccaacattgatcgccctaaaggactggcattcactgatgtggatgtcgattccatcaaaattgcttgggaaagcccacaggggcaagtttccaggtacagggtgacctactcgagccctgaggatggaatccatgagctattccctgcacctgatggtgaagaagacactgcagagctgcaaggcctcagaccgggttctgagtacacagtcagtgtggttgccttgcacgatgatatggagagccagcccctgattggaacccagtccacagctattcctgcaccaactgacctgaagttcactcaggtcacacccacaagcctgagcgcccagtggacaccacccaatgttcagctcactggatatcgagtgcgggtgacccccaaggagaagaccggaccaatgaaagaaatcaaccttgctcctgacagctcatccgtggttgtatcaggacttatggtggccaccaaatatgaagtgagtgtctatgctcttaaggacactttgacaagcagaccagctcagggagttgtcaccactctggagaatgtcagcccaccaagaagggctcgtgtgacagatgctactgagaccaccatcaccattagctggagaaccaagactgagacgatcactggcttccaagttgatgccgttccagccaatggccagactccaatccagagaaccatcaagccagatgtcagaagctacaccatcacaggtttacaaccaggcactgactacaagatctacctgtacaccttgaatgacaatgctcggagctcccctgtggtcatcgacgcctccactgccattgatgcaccatccaacctgcgtttcctggccaccacacccaattccttgctggtatcatggcagccgccacgtgccaggattaccggctacatcatcaagtatgagaagcctgggtctcctcccagagaagtggtccctcggccccgccctggtgtcacagaggctactattactggcctggaaccgggaaccgaatatacaatttatgtcattgccctgaagaataatcagaagagcgagcccctgattggaaggaaaaagacagacgagcttccccaactggtaacccttccacaccccaatcttcatggaccagagatcttggatgttccttccacagttcaaaagacccctttcgtcacccaccctgggtatgacactggaaatggtattcagcttcctggcacttctggtcagcaacccagtgttgggcaacaaatgatctttgaggaacatggttttaggcggaccacaccgcccacaacggccacccccataaggcataggccaagaccatacccgccgaatgtaggacaagaagctctctctcagacaaccatctcatgggccccattccaggacacttctgagtacatcatttcatgtcatcctgttggcactgatgaagaacccttacagttcagggttcctggaacttctaccagtgccactctgacaggcctcaccagaggtgccacctacaacatcatagtggaggcactgaaagaccagcagaggcataaggttcgggaagaggttgttaccgtgggcaactctgtcaacgaaggcttgaaccaacctacggatgactcgtgctttgacccctacacagtttcccattatgccgttggagatgagtgggaacgaatgtctgaatcaggctttaaactgttgtgccagtgcttaggctttggaagtggtcatttcagatgtgattcatctagatggtgccatgacaatggtgtgaactacaagattggagagaagtgggaccgtcagggagaaaatggccagatgatgagctgcacatgtcttgggaacggaaaaggagaattcaagtgtgaccctcatgaggcaacgtgttatgatgatgggaagacataccacgtaggagaacagtggcagaaggaatatctcggtgccatttgctcctgcacatgctttggaggccagcggggctggcgctgtgacaactgccgcagacctgggggtgaacccagtcccgaaggcactactggccagtcctacaaccagtattctcagagataccatcagagaacaaacactaatgttaattgcccaattgagtgcttcatgcctttagatgtacaggctgacagagaagattcccgagagtaaatcatctttccaatccagaggaacaagcatgtctctctgccaagatccatctaaactggagtgatgttagcagacccagcttagagttcttctttctttcttaagccctttgctctggaggaagttctccagcttcagctcaactcacagcttctccaagcatcaccctgggagtttcctgagggttttctcataaatgagggctgcacattgcctgttctgcttcgaagtattcaataccgctcagtattttaaatgaagtgattctaagatttggtttgggatcaataggaaagcatatgcagccaaccaagatgcaaatgttttgaaatgatatgaccaaaattttaagtaggaaagtcacccaaacacttctgctttcacttaagtgtctggcccgcaatactgtaggaacaagcatgatcttgttactgtgatattttaaatatccacagtactcactttttccaaatgatcctagtaattgcctagaaatatctttctcttacctgttatttatcaatttttcccagtatttttatacggaaaaaattgtattgaaaacacttagtatgcagttgataagaggaatttggtataattatggtgggtgattattttttatactgtatgtgccaaagctttactactgtggaaagacaactgttttaataaaagatttacattccacaacttgaagttcatctatttgatataagacaccttcgggggaaataattcctgtgaatattctttttcaattcagcaaacatttgaaaatctatgatgtgcaagtctaattgttgatttcagtacaagattttctaaatcagttgctacaaaaactgattggtttttgtcacttcatctcttcactaatggagatagctttacactttctgctttaatagatttaagtggaccccaatatttattaaaattgctagtttaccgttcagaagtataatagaaataatctttagttgctcttttctaaccattgtaattcttcccttcttccctccacctttccttcattgaataaacctctgttcaaagagattgcctgcaagggaaataaaaatgactaagatattaaaaaaaaaaaaaaaaaa

SEQ ID NO: 263 - DNA, 2187 bp, Homo sapiens
agcccgggcggcgggctagggcgctcgcagggcttctgggccgaccccgctccggcgcctccgcttcccgcccggggcccgccctcgcggcccggcctcgctcccgggtcccagatgaccaccgagggcgggccgccgccggccccgctccgccgcgcgtgcagcccggtccccggcgcgctccaggccgccctgatgagcccgccgcccgccgccgccgccgccgccgccgccgccccggagaccacctcctcctcctcgtcgtcgtcctccgcctcctgcgcctcgtcctcgtcctcctccaattcggccagcgccccctcggctgcctgcaagagcgcgggcggcggcggcgcgggcgccgggagcgggggcgccaagaaggcgagctcggggctgcggcggcccgagaagccgccctactcgtacatcgcgctcatcgtcatggccatccagagctcgcccagcaagcgcctgacgctcagcgagatctaccagttcctgcaggcgcgcttccccttcttccgcggcgcctaccagggctggaagaactcggtgcgccacaatctctcgctcaacgagtgcttcatcaagctgcctaagggcctcgggcggcccggcaagggccactactggaccatcgacccggccagcgagttcatgttcgaggagggctcgttccgccgccggccgcgcggcttcaggcggaagtgccaggcgctcaagcccatgtaccaccgcgtggtgagcggcttgggcttcggggcgtcgctgctgccccagggcttcgacttccaggcgcccccgtcggcgccgctcggctgccacagccagggcggctacggcggcctcgacatgatgcccgcgggctacgacgccggcgcgggcgcccccagccacgcgcaccctcaccaccaccaccaccaccacgtcccgcacatgtcgcccaacccgggttccacctacatggccagctgcccggtgcccgcgggacccgggggcgtcggtgcggccgggggcggcggcggcggcgactacgggccggacagcagcagcagcccggtaccctcgtccccggccatggcgagcgccatcgaatgccactcgccctacacgagccctgcggcgcactggagctcgcctggcgcctcgccttacctcaagcagccgcctgccctgacgcccagcagcaaccccgccgcctcggcaggcctgcactccagcatgtcctcctactcgctggagcagagctacttgcaccagaacgctcgcgaggacctctcagtgggactgccccgttaccagcatcactctactccagtgtgtgacagaaaagatttcgtcctcaacttcaatgggatttcttctttccatccctcagctagcgggtcgtattatcaccatcaccaccagagcgtctgtcaggatattaagccctgcgtcatgtgaacggaaagaggccaagcgatggccgctctctcctctcccctcctcagagggggcagatagaaactgggacggattcaagtcacatgcacgcggatagcagtaagccacacacctgccacttagccagaatgcccaggatcgcgttggtcactgttatttgcctactgctggaagaaggacaaccgctggcaaggtagcgttccccaatctgaatacctgcaggctcccacatgagggagagggcagactcaggtgggaagatgtgccatgcgtaaggcatcaacgtgtatctgtgggatcttcgttgccttcagtaatcagggtgtgaaaaaagcagacaagttgtgtgtgtgtgtgtgtgtctaagaaaacttgtgtgcttttcaaaaaggcagtgctaagcacaagatttcaagaaagcctcttcttgttgcctagctgagtgggagagtcattttccccagacactacatttggatacaggtgccaaagaacattattaaggaattatttagaaacaatgtgtctagtttaagaaagtggttttcagtattgtgacaatacaacgtttttacaaggttgttttctaccaccatattttaaagatatttttatgaccgtgtatactcacactttgcttgtattttaaaaggaggatatatttgcacttatgtatacttttacagtttgccaaaatattttgttgtaaaattttttttcaataaaatgtatataaca

SEQ ID NO: 264 - DNA, 3705 bp, Homo sapiens
gatcggcggagctcccacctccgcttacagctcgctgccgccgtcctgccccgcgcccccaggagacctggaccagaccacgatgtggaaacgctggctcgcgctcgcgctcgcgctggtggcggtcgcctgggtccgcgccgaggaagagctaaggagcaaatccaagatctgtgccaatgtgttttgtggagccggccgggaatgtgcagtcacagagaaaggggaacccacctgtctctgcattgagcaatgcaaacctcacaagaggcctgtgtgtggcagtaatggcaagacctacctcaaccactgtgaactgcatcgagatgcctgcctcactggatccaaaatccaggttgattacgatggacactgcaaagagaagaaatccgtaagtccatctgccagcccagttgtttgctatcagtccaaccgtgatgagctccgacgtcgcatcatccagtggctggaagctgagatcattccagatggctggttctctaaaggcagcaactacagtgaaatcctagacaagtattttaagaactttgataatggtgattctcgcctggactccagtgaattcctgaagtttgtggaacagaatgaaactgccatcaatattacaacgtatccagaccaggagaacaacaagttgcttaggggactctgtgttgatgctctcattgaactgtctgatgaaaatgctgattggaaactcagcttccaagagtttctcaagtgcctcaacccatctttcaaccctcctgagaagaagtgtgccctggaggatgaaacgtatgcagatggagctgagaccgaggtggactgtaaccgctgtgtctgtgcctgtggaaattgggtctgtacagccatgacctgtgacggaaagaatcagaagggggcccagacccagacagaggaggagatgaccagatatgtccaggagctccaaaagcatcaggaaacagctgaaaagaccaagagagtgagcaccaaagagatctaatgaggaggcacagaccagtgtctggatcccagcatcttctccacttcagcgctgagttcagtatacacaagtgtctgctacagtcgccaaatcaccagtatttgcttatatagcaatgagttttattttgtttatttgttttgcaataaaggatatgaaggtggctggctaggaagggaagggccacagccttcatttctaggagtgctttaagagaaactgtaaatggtgctctggggctggaggctagtaaggaaactgcatcacgattgaaagaggaacagacccaaatctgaacctcttttgagtttactgcatctgtcagcaggctgcagggagtgcacacgatgccagagagaacttagcagggtgtccccggaggagaggtttgggaagctccacggagaggaacgctctctgcttccagcctctttccattgccgtcagcatgacagacctccagcatccacgcatctcttggtcccaataactgcctctagatacatagccatactgctagttaacccagtgtccctcagacttggatggagtttctgggagggtacacccaaatgatgcagatacttgtatactttgagccccttagcgacctaaccaaattttaaaaatactttttaccaaaggtgctatttctctgtaaaacactttttttttggcaagttgactttattcttcaattattatcattatattattgttttttaatattttattttcttgactaggtattaagcttttgtaattatttttcagtagtcccaccacttcataggtggaaggagtttggggttcttcctggtgcaggggctgaaataacccagatgcccccaccctgccacatactagatgcagcccatagttggcccccctagcttccagcagtccactatctgccagaggagcaagggtgccttagaccgaagccaggggaagaagcatcttcataaaaaactttcaagatccaaacattaatttgtttttatttattctgagaagttgaggcaaatcagtattcccaaggatggcgacaagggcagccaagcagggcttaggatatcccagcctaccaatatgctcattcgactaactaggagggtgagttggccctgtctcttcttttttctggacctcagtttcctcagtgagctggtaagaatgcactaaccttttgatttgataagttataaattctgtggttctgatcattggtccagaggggagataggttcctgtgatttttccttcttctctatagaataaatgaaatcttgttactagaacaagaaatgtcagatggccaaaaacaagatgaccagatttgatctcagcctgatgaccctacaggtcgtgctatgatatggagtcctcatgggtaaagcaggaagagagtgggaaagagaaccaccccactctgtcttcatatttgcatttcatgtttaacctccggctggaaatagaaagcattcccttagagatgaggataaaagaaagtttcagattcaacagggggaagaaaatggagatttaatcctaaaactgtgacttggggaggtcagtcatttacagttagtcctgtgtctttcgacttctgtgattattaaccccactcactaccctgtttcagatgcatttggaataccaaagattaaatccttgacataagatctcatttgcagaaagcagattaaagaccatcagaaggaaattatttaggttgtaatgcacaggcaactgtgagaaactgttgtgccaaaaatagaattccttctagtttttcttgttctcatttgaaaggagaaaattccactttgtttagcatttcaagcttttatgtatccatcccatctaaaaactcttcaaactccacttgttcagtctgaaatgcagctccctgtccaagtgccttggagaactcacagcagcacgccttaatcaaaggttttaccagcccttggacactatgggaggagggcaagagtacaccaatttgttaaaagcaagaaaccacagtgtctcttcactagtcatttagaacatggttatcatccaagactactctaccctgcaacattgaactcccaagagcaaatccacattcctcttgagttctgcagcttctgtgtaaatagggcagctgtcgtctatgccgtagaatcacatgatctgaggaccattcatggaagctgctaaatagcctagtctggggagtcttccataaagttttgcatggagcaaacaaacaggattaaactaggtttggttccttcagccctctaaaagcatagggcttagcctgcaggcttccttgggctttctctgtgtgtgtagttttgtaaacactatagcatctgttaagatccagtgtccatggaaacattcccacatgccgtgactctggactatatcagtttttggaaagcagggttcctctgcctgctaacaagcccacgtggaccagtctgaatgtctttcctttacacctatgtttttaagtagtcaaacttcaagaaacaatctaaacaagtttctgttgcatatgtgtttgtgaacttgtatttgtatttagtaggcttctatattgcatttaacttgtttttgtaactcctgattcttccttttcggatactattgatgaataaagaaattaaagtgaaaaaaaaaaaaaaaaaaaaaaa

SEQ ID NO: 265 - DNA, 1396 bp, Homo sapiens
ctgtatttaggcctgtaagtgagacatgcacagacagatctggcatctccactggacactggtcaggtaccccaattatgaatttattagtgataactctatttcctggtcagctggactgcacaatcgatacacagaaaattcacttcgtggagtgatcctggatatacattttctctctcaggcagacttcctagtgtgtactttttcatcccaggtctgtcgagttgcttatgaaattatgcaaacactacatcctgatgcctctgcaaacttccattctttagatgacatctactattttgggggccagaatgcccacaatcaaattgccatttatgctcaccaaccccgaactgcagatgaaattcccatggaacctggagatatcattggtgtggctggaaatcattgggatggctattctaaaggtgtcaacaggaaattgggaaggacgggcctatatccctcctacaaagttcgagagaagatagaaacggtcaagtaccccacatatcctgaggctgagaaataaagctcagatggaagagataaacgaccaaactcagttcgaccaaactcagttcaaaccatttcagccaaactgtagatgaagagggctctgatctaacaaaataaggttatatgagtagatactctcagcaccaagagcagctgggaactgacataggcttcaattggtggaattcctctttaacaagggctgcaatgccctcatacccatgcacagtacaataatgtactcacatataacatgcaaacaggttgttttctactttgcccctttcagtatgtccccataagacaaacactgccatattgtgtaatttaagtgacacagacattttgtgtgagacttaaaacatggtgcctatatctgagagacctgtgtgaactattgagaagatcggaacagctccttactctgaggaagttgattcttatttgatggtggtattgtgaccactgaattcactccagtcaacagattcagaatgagaatggacgtttggtttttttttgtttttgtttttgttttttcctttataaggttgtctgtttttttttttttaaataattgcatcagttcattgacctcatcattaataagtgaagaatacatcagaaaataaaatattcactctccattagaaaattttgtaaaacaatgccatgaacaaattctttagtactcaatgtttctggacattctctttgataacaaaaaataaattttaaaaaggaattttgtaaagtttctagaattttatatcattggatgatatgttgatcagccttatgtggaagaactgtgataaaaagaggagctttttagtttttcagcttaaaaaaaaaaaaaaaaaaaaaaaaaaaa

SEQ ID NO: 266 - DNA, 3291 bp, Homo sapiens
ggccgacccgagcagccggttccctcctctccaggccccctccccatcccacccccgccgcctggccccagccgacccgtcccttcgtctccccgcggaatggggccggcactgctcagggtcgcgcgccctggacccagctcgctctcggtctcgcgctgtcagcgactgcccggctcgcgccgcctcgcgctctgcctcagtcagtggcgccgaaggctccgttaagcggcggcggcggttcctgtttccgtttcttcctctccgttcggtcgggagtagcatcctccactcagccacccttcccactcccccatcgtggggcagctgcggctgagggctgtggctttggcagctgcgacggggagcggcggagaccgcctctgctcccgcctggggttgctgcttttgctcagaggacatccatgaccctaatggtctttttgttcaagataaagtgattttttgcctttgttgattaactggacaaattcagcatgtagagcgcatgaagtacaggacaataaagcttcctacacatatcaccaggaggatctctttgaaagattcactgcaggactaccagagagaataatttgtctgaagcatcatgtgttgaaacaacagaagtctattcacctgtgcactaactagaaacagagttacaatgttttcaattctttgagctccaggactccagggaagtgagttgaaaatctgaaaatgcggccatggactggttcctggcgttggattatgctcattctttttgcctgggggaccttgctgttttatataggtggtcacttggtacgagataatgaccatcctgatcactctagccgagaactgtccaagattctggcaaagcttgaacgcttaaaacaacagaatgaagacttgaggcgaatggccgaatctctccggataccagaaggccctattgatcaggggccagctataggaagagtacgcgttttagaagagcagcttgttaaggccaaagaacagattgaaaattacaagaaacagaccagaaatggtctggggaaggatcatgaaatcctgaggaggaggattgaaaatggagctaaagagctctggtttttcctacagagtgaattgaagaaattaaagaacttagaaggaaatgaactccaaagacatgcagatgaatttcttttggatttaggacatcatgaaaggtctataatgacggatctatactacctcagtcagacagatggagcaggtgattggcgggaaaaagaggccaaagatctgacagaactggttcagcggagaataacatatcttcagaatcccaaggactgcagcaaagccaaaaagctggtgtgtaatatcaacaaaggctgtggctatggctgtcagctccatcatgtggtctactgcttcatgattgcatatggcacccagcgaacactcatcttggaatctcagaattggcgctatgctactggtggatgggagactgtatttaggcctgtaagtgagacatgcacagacagatctggcatctccactggacactggtcaggtgaagtgaaggacaaaaatgttcaagtggtcgagcttcccattgtagacagtcttcatccccgtcctccatatttacccttggctgtaccagaagacctcgcagatcgacttgtacgagtgcatggtgaccctgcagtgtggtgggtgtctcagtttgtcaaatacttgatccgcccacagccttggctagaaaaagaaatagaagaagccaccaagaagcttggcttcaaacatccagttattggagtccatgtcagacgcacagacaaagtgggaacagaagctgccttccatcccattgaagagtacatggtgcatgttgaagaacattttcagcttcttgcacgcagaatgcaagtggacaaaaaaagagtgtatttggccacagatgacccttctttattaaaggaggcaaaaacaaagtaccccaattatgaatttattagtgataactctatttcctggtcagctggactgcacaatcgatacacagaaaattcacttcgtggagtgatcctggatatacattttctctctcaggcagacttcctagtgtgtactttttcatcccaggtctgtcgagttgcttatgaaattatgcaaacactacatcctgatgcctctgcaaacttccattctttagatgacatctactattttgggggccagaatgcccacaatcaaattgccatttatgctcaccaaccccgaactgcagatgaaattcccatggaacctggagatatcattggtgtggctggaaatcattgggatggctattctaaaggtgtcaacaggaaattgggaaggacgggcctatatccctcctacaaagttcgagagaagatagaaacggtcaagtaccccacatatcctgaggctgagaaataaagctcagatggaagagataaacgaccaaactcagttcgaccaaactcagttcaaaccatttcagccaaactgtagatgaagagggctctgatctaacaaaataaggttatatgagtagatactctcagcaccaagagcagctgggaactgacataggcttcaattggtggaattcctctttaacaagggctgcaatgccctcatacccatgcacagtacaataatgtactcacatataacatgcaaacaggttgttttctactttgcccctttcagtatgtccccataagacaaacactgccatattgtgtaatttaagtgacacagacattttgtgtgagacttaaaacatggtgcctatatctgagagacctgtgtgaactattgagaagatcggaacagctccttactctgaggaagttgattcttatttgatggtggtattgtgaccactgaattcactccagtcaacagattcagaatgagaatggacgtttggtttttttttgtttttgtttttgttttttcctttataaggttgtctgtttttttttttttaaataattgcatcagttcattgacctcatcattaataagtgaagaatacatcagaaaataaaatattcactctccattagaaaattttgtaaaacaatgccatgaacaaattctttagtactcaatgtttctggacattctctttgataacaaaaaataaattttaaaaaggaattttgtaaagtttctagaattttatatcattggatgatatgttgatcagccttatgtggaagaactgtgataaaaagaggagctttttagtttttcagcttaaaaaaa

SEQ ID NO: 267 - DNA, 3677 bp, Homo sapiens
cgtttagtacagaaatctcatgggagagagcatccatgcatttacaaattgttattgaattattttattgaatgatgacacccaaactgagctagaacataattctggctctgctagtacatcttctgtgtgatcttggacaagtcactctactttcctttcaattttcttttctcacagggagataatcataaaaacgactgtaaagtacagcacttcatagagtgctttttgtttaaagagctgacaataaatacgagtctcaaggtctaggaaagcctccctcacaacctgagctgcttgaggacaagggattttcttttgaatcagcagtaccttatttgtgtatctgtgatagagttcctggtacataagaaggtctcaataaatatgtgaatttatgaatattaggcagattgcaaccttgacaggccactgcctcttaaatctcctttctgtgatcttttaatatttaacatctaaaaggccgccgctacttgctttgggataagtatccccggtatgtactttaaaatgcccaagcctagagaaatgattcttgtcttaagggcaccatttcgctctcccaccgtaaagcgccccaggcttgggatctgggtcccaaggctacagggaagagtttggaacgggaagctcatcttccggccctctgattggccggctcgcactccactcacgcggcgcgcagctctgattggcctcggcggcacccctcgtcccgcgactactttgtgtgctggggcggcgcgctccggtcctcccgctcagctggcggtctgggctgctctggggcagcccttcggtccactgctctgcatcgcgggcgccgggaattttccgagtccgagcggcatgtagagcgcatgaagtacaggacaataaagcttcctacacatatcaccaggaggatctctttgaaagattcactgcaggactaccagagagaataatttgtctgaagcatcatgtgttgaaacaacagaagtctattcacctgtgcactaactagaaacagagttacaatgttttcaattctttgagctccaggactccagggaagtgagttgaaaatctgaaaatgcggccatggactggttcctggcgttggattatgctcattctttttgcctgggggaccttgctgttttatataggtggtcacttggtacgagataatgaccatcctgatcactctagccgagaactgtccaagattctggcaaagcttgaacgcttaaaacaacagaatgaagacttgaggcgaatggccgaatctctccggataccagaaggccctattgatcaggggccagctataggaagagtacgcgttttagaagagcagcttgttaaggccaaagaacagattgaaaattacaagaaacagaccagaaatggtctggggaaggatcatgaaatcctgaggaggaggattgaaaatggagctaaagagctctggtttttcctacagagtgaattgaagaaattaaagaacttagaaggaaatgaactccaaagacatgcagatgaatttcttttggatttaggacatcatgaaaggtctataatgacggatctatactacctcagtcagacagatggagcaggtgattggcgggaaaaagaggccaaagatctgacagaactggttcagcggagaataacatatcttcagaatcccaaggactgcagcaaagccaaaaagctggtgtgtaatatcaacaaaggctgtggctatggctgtcagctccatcatgtggtctactgcttcatgattgcatatggcacccagcgaacactcatcttggaatctcagaattggcgctatgctactggtggatgggagactgtatttaggcctgtaagtgagacatgcacagacagatctggcatctccactggacactggtcaggtgaagtgaaggacaaaaatgttcaagtggtcgagcttcccattgtagacagtcttcatccccgtcctccatatttacccttggctgtaccagaagacctcgcagatcgacttgtacgagtgcatggtgaccctgcagtgtggtgggtgtctcagtttgtcaaatacttgatccgcccacagccttggctagaaaaagaaatagaagaagccaccaagaagcttggcttcaaacatccagttattggagtccatgtcagacgcacagacaaagtgggaacagaagctgccttccatcccattgaagagtacatggtgcatgttgaagaacattttcagcttcttgcacgcagaatgcaagtggacaaaaaaagagtgtatttggccacagatgacccttctttattaaaggaggcaaaaacaaagtaccccaattatgaatttattagtgataactctatttcctggtcagctggactgcacaatcgatacacagaaaattcacttcgtggagtgatcctggatatacattttctctctcaggcagacttcctagtgtgtactttttcatcccaggtctgtcgagttgcttatgaaattatgcaaacactacatcctgatgcctctgcaaacttccattctttagatgacatctactattttgggggccagaatgcccacaatcaaattgccatttatgctcaccaaccccgaactgcagatgaaattcccatggaacctggagatatcattggtgtggctggaaatcattgggatggctattctaaaggtgtcaacaggaaattgggaaggacgggcctatatccctcctacaaagttcgagagaagatagaaacggtcaagtaccccacatatcctgaggctgagaaataaagctcagatggaagagataaacgaccaaactcagttcgaccaaactcagttcaaaccatttcagccaaactgtagatgaagagggctctgatctaacaaaataaggttatatgagtagatactctcagcaccaagagcagctgggaactgacataggcttcaattggtggaattcctctttaacaagggctgcaatgccctcatacccatgcacagtacaataatgtactcacatataacatgcaaacaggttgttttctactttgcccctttcagtatgtccccataagacaaacactgccatattgtgtaatttaagtgacacagacattttgtgtgagacttaaaacatggtgcctatatctgagagacctgtgtgaactattgagaagatcggaacagctccttactctgaggaagttgattcttatttgatggtggtattgtgaccactgaattcactccagtcaacagattcagaatgagaatggacgtttggtttttttttgtttttgtttttgttttttcctttataaggttgtctgtttttttttttttaaataattgcatcagttcattgacctcatcattaataagtgaagaatacatcagaaaataaaatattcactctccattagaaaattttgtaaaacaatgccatgaacaaattctttagtactcaatgtttctggacattctctttgataacaaaaaataaattttaaaaaggaattttgtaaagtttctagaattttatatcattggatgatatgttgatcagccttatgtggaagaactgtgataaaaagaggagctttttagtttttcagcttaaaaaaaaaaaaaaaaa

SEQ ID NO: 268 - DNA, 3775 bp, Homo sapiens
cgtttagtacagaaatctcatgggagagagcatccatgcatttacaaattgttattgaattattttattgaatgatgacacccaaactgagctagaacataattctggctctgctagtacatcttctgtgtgatcttggacaagtcactctactttcctttcaattttcttttctcacagggagataatcataaaaacgactgtaaagtacagcacttcatagagtgctttttgtttaaagagctgacaataaatacgagtctcaaggtctaggaaagcctccctcacaacctgagctgcttgaggacaagggattttcttttgaatcagcagtaccttatttgtgtatctgtgatagagttcctggtacataagaaggtctcaataaatatgtgaatttatgaatattaggcagattgcaaccttgacaggccactgcctcttaaatctcctttctgtgatcttttaatatttaacatctaaaaggccgccgctacttgctttgggataagtatccccggtatgtactttaaaatgcccaagcctagagaaatgattcttgtcttaagggcaccatttcgctctcccaccgtaaagcgccccaggcttgggatctgggtcccaaggctacagggaagagtttggaacgggaagctcatcttccggccctctgattggccggctcgcactccactcacgcggcgcgcagctctgattggcctcggcggcacccctcgtcccgcgactactttgtgtgctggggcggcgcgctccggtcctcccgctcagctggcggtctgggctgctctggggcagcccttcggtccactgctctgcatcgcgggcgccgggaattttccgagtccgagcgggttgctgcttttgctcagaggacatccatgaccctaatggtctttttgttcaagataaagtgattttttgcctttgttgattaactggacaaattcagcatgtagagcgcatgaagtacaggacaataaagcttcctacacatatcaccaggaggatctctttgaaagattcactgcaggactaccagagagaataatttgtctgaagcatcatgtgttgaaacaacagaagtctattcacctgtgcactaactagaaacagagttacaatgttttcaattctttgagctccaggactccagggaagtgagttgaaaatctgaaaatgcggccatggactggttcctggcgttggattatgctcattctttttgcctgggggaccttgctgttttatataggtggtcacttggtacgagataatgaccatcctgatcactctagccgagaactgtccaagattctggcaaagcttgaacgcttaaaacaacagaatgaagacttgaggcgaatggccgaatctctccggataccagaaggccctattgatcaggggccagctataggaagagtacgcgttttagaagagcagcttgttaaggccaaagaacagattgaaaattacaagaaacagaccagaaatggtctggggaaggatcatgaaatcctgaggaggaggattgaaaatggagctaaagagctctggtttttcctacagagtgaattgaagaaattaaagaacttagaaggaaatgaactccaaagacatgcagatgaatttcttttggatttaggacatcatgaaaggtctataatgacggatctatactacctcagtcagacagatggagcaggtgattggcgggaaaaagaggccaaagatctgacagaactggttcagcggagaataacatatcttcagaatcccaaggactgcagcaaagccaaaaagctggtgtgtaatatcaacaaaggctgtggctatggctgtcagctccatcatgtggtctactgcttcatgattgcatatggcacccagcgaacactcatcttggaatctcagaattggcgctatgctactggtggatgggagactgtatttaggcctgtaagtgagacatgcacagacagatctggcatctccactggacactggtcaggtgaagtgaaggacaaaaatgttcaagtggtcgagcttcccattgtagacagtcttcatccccgtcctccatatttacccttggctgtaccagaagacctcgcagatcgacttgtacgagtgcatggtgaccctgcagtgtggtgggtgtctcagtttgtcaaatacttgatccgcccacagccttggctagaaaaagaaatagaagaagccaccaagaagcttggcttcaaacatccagttattggagtccatgtcagacgcacagacaaagtgggaacagaagctgccttccatcccattgaagagtacatggtgcatgttgaagaacattttcagcttcttgcacgcagaatgcaagtggacaaaaaaagagtgtatttggccacagatgacccttctttattaaaggaggcaaaaacaaagtaccccaattatgaatttattagtgataactctatttcctggtcagctggactgcacaatcgatacacagaaaattcacttcgtggagtgatcctggatatacattttctctctcaggcagacttcctagtgtgtactttttcatcccaggtctgtcgagttgcttatgaaattatgcaaacactacatcctgatgcctctgcaaacttccattctttagatgacatctactattttgggggccagaatgcccacaatcaaattgccatttatgctcaccaaccccgaactgcagatgaaattcccatggaacctggagatatcattggtgtggctggaaatcattgggatggctattctaaaggtgtcaacaggaaattgggaaggacgggcctatatccctcctacaaagttcgagagaagatagaaacggtcaagtaccccacatatcctgaggctgagaaataaagctcagatggaagagataaacgaccaaactcagttcgaccaaactcagttcaaaccatttcagccaaactgtagatgaagagggctctgatctaacaaaataaggttatatgagtagatactctcagcaccaagagcagctgggaactgacataggcttcaattggtggaattcctctttaacaagggctgcaatgccctcatacccatgcacagtacaataatgtactcacatataacatgcaaacaggttgttttctactttgcccctttcagtatgtccccataagacaaacactgccatattgtgtaatttaagtgacacagacattttgtgtgagacttaaaacatggtgcctatatctgagagacctgtgtgaactattgagaagatcggaacagctccttactctgaggaagttgattcttatttgatggtggtattgtgaccactgaattcactccagtcaacagattcagaatgagaatggacgtttggtttttttttgtttttgtttttgttttttcctttataaggttgtctgtttttttttttttaaataattgcatcagttcattgacctcatcattaataagtgaagaatacatcagaaaataaaatattcactctccattagaaaattttgtaaaacaatgccatgaacaaattctttagtactcaatgtttctggacattctctttgataacaaaaaataaattttaaaaaggaattttgtaaagtttctagaattttatatcattggatgatatgttgatcagccttatgtggaagaactgtgataaaaagaggagctttttagtttttcagcttaaaaaaaaaaaaaaaaa

SEQ ID NO: 269 - DNA, 2963 bp, Homo sapiens
ggccgacccgagcagccggttccctcctctccaggccccctccccatcccacccccgccgcctggccccagccgacccgtcccttcgtctccccgcggaatggggccggcactgctcagggtcgcgcgccctggacccagctcgctctcggtctcgcgctgtcagcgactgcccggctcgcgccgcctcgcgctctgcctcagtcagtggcgccgaaggctccgttaagcggcggcggcggttcctgtttccgtttcttcctctccgttcggtcgggagtagcatcctccactcagccacccttcccactcccccatcgtggggcagctgcggctgagggctgtggctttggcagctgcgacggggagcggcggagaccgcctctgctcccgcctggggttgctgcttttgctcagaggacatccatgaccctaatggtctttttgttcaagataaagtgattttttgcctttgttgattaactggacaaattcaggataccagaaggccctattgatcaggggccagctataggaagagtacgcgttttagaagagcagcttgttaaggccaaagaacagattgaaaattacaagaaacagaccagaaatggtctggggaaggatcatgaaatcctgaggaggaggattgaaaatggagctaaagagctctggtttttcctacagagtgaattgaagaaattaaagaacttagaaggaaatgaactccaaagacatgcagatgaatttcttttggatttaggacatcatgaaaggattctgatggcaattactgtctcattagtgaacaataaaagaaaaattgttgtattagcacaacctactactgtgaagaggaaaagaattaccccatacaagtctataatgacggatctatactacctcagtcagacagatggagcaggtgattggcgggaaaaagaggccaaagatctgacagaactggttcagcggagaataacatatcttcagaatcccaaggactgcagcaaagccaaaaagctggtgtgtaatatcaacaaaggctgtggctatggctgtcagctccatcatgtggtctactgcttcatgattgcatatggcacccagcgaacactcatcttggaatctcagaattggcgctatgctactggtggatgggagactgtatttaggcctgtaagtgagacatgcacagacagatctggcatctccactggacactggtcaggtgaagtgaaggacaaaaatgttcaagtggtcgagcttcccattgtagacagtcttcatccccgtcctccatatttacccttggctgtaccagaagacctcgcagatcgacttgtacgagtgcatggtgaccctgcagtgtggtgggtgtctcagtttgtcaaatacttgatccgcccacagccttggctagaaaaagaaatagaagaagccaccaagaagcttggcttcaaacatccagttattggagtccatgtcagacgcacagacaaagtgggaacagaagctgccttccatcccattgaagagtacatggtgcatgttgaagaacattttcagcttcttgcacgcagaatgcaagtggacaaaaaaagagtgtatttggccacagatgacccttctttattaaaggaggcaaaaacaaagtaccccaattatgaatttattagtgataactctatttcctggtcagctggactgcacaatcgatacacagaaaattcacttcgtggagtgatcctggatatacattttctctctcaggcagacttcctagtgtgtactttttcatcccaggtctgtcgagttgcttatgaaattatgcaaacactacatcctgatgcctctgcaaacttccattctttagatgacatctactattttgggggccagaatgcccacaatcaaattgccatttatgctcaccaaccccgaactgcagatgaaattcccatggaacctggagatatcattggtgtggctggaaatcattgggatggctattctaaaggtgtcaacaggaaattgggaaggacgggcctatatccctcctacaaagttcgagagaagatagaaacggtcaagtaccccacatatcctgaggctgagaaataaagctcagatggaagagataaacgaccaaactcagttcgaccaaactcagttcaaaccatttcagccaaactgtagatgaagagggctctgatctaacaaaataaggttatatgagtagatactctcagcaccaagagcagctgggaactgacataggcttcaattggtggaattcctctttaacaagggctgcaatgccctcatacccatgcacagtacaataatgtactcacatataacatgcaaacaggttgttttctactttgcccctttcagtatgtccccataagacaaacactgccatattgtgtaatttaagtgacacagacattttgtgtgagacttaaaacatggtgcctatatctgagagacctgtgtgaactattgagaagatcggaacagctccttactctgaggaagttgattcttatttgatggtggtattgtgaccactgaattcactccagtcaacagattcagaatgagaatggacgtttggtttttttttgtttttgtttttgttttttcctttataaggttgtctgtttttttttttttaaataattgcatcagttcattgacctcatcattaataagtgaagaatacatcagaaaataaaatattcactctccattagaaaattttgtaaaacaatgccatgaacaaattctttagtactcaatgtttctggacattctctttgataacaaaaaataaattttaaaaaggaattttgtaaagtttctagaattttatatcattggatgatatgttgatcagccttatgtggaagaactgtgataaaaagaggagctttttagtttttcagcttaaaaaaa

SEQ ID NO: 270 - DNA, 1983 bp, Homo sapiens
cgagtaaagtttgcaaagaggcgcgggaggcggcagccgcagcgaggaggcggcggggaagaagcgcagtctccgggttgggggcgggggcggggggggcgccaaggagccgggtggggggcggcggccagcatgcggccccgcagcgccctgccccgcctgctgctgccgctgctgctgctgcccgccgccgggccggcccagttccacggggagaagggcatctccatcccggaccacggcttctgccagcccatctccatcccgctgtgcacggacatcgcctacaaccagaccatcatgcccaaccttctgggccacacgaaccaggaggacgcaggcctagaggtgcaccagttctatccgctggtgaaggtgcagtgctcgcccgaactgcgcttcttcctgtgctccatgtacgcacccgtgtgcaccgtgctggaacaggccatcccgccgtgccgctctatctgtgagcgcgcgcgccagggctgcgaagccctcatgaacaagttcggttttcagtggcccgagcgcctgcgctgcgagcacttcccgcgccacggcgccgagcagatctgcgtcggccagaaccactccgaggacggagctcccgcgctactcaccaccgcgccgccgccgggactgcagccgggtgccgggggcaccccgggtggcccgggcggcggcggcgctcccccgcgctacgccacgctggagcaccccttccactgcccgcgcgtcctcaaggtgccatcctatctcagctacaagtttctgggcgagcgtgattgtgctgcgccctgcgaacctgcgcggcccgatggttccatgttcttctcacaggaggagacgcgtttcgcgcgcctctggatcctcacctggtcggtgctgtgctgcgcttccaccttcttcactgtcaccacgtacttggtagacatgcagcgcttccgctacccagagcggcctatcatttttctgtcgggctgctacaccatggtgtcggtggcctacatcgcgggcttcgtgctccaggagcgcgtggtgtgcaacgagcgcttctccgaggacggttaccgcacggtggtgcagggcaccaagaaggagggctgcaccatcctcttcatgatgctctacttcttcagcatggccagctccatctggtgggtcatcctgtcgctcacctggttcctggcagccggcatgaagtggggccacgaggccatcgaggccaactctcagtacttccacctggccgcctgggccgtgccggccgtcaagaccatcaccatcctggccatgggccagatcgacggcgacctgctgagcggcgtgtgcttcgtaggcctcaacagcctggacccgctgcggggcttcgtgctagcgccgctcttcgtgtacctgttcatcggcacgtccttcctcctggccggcttcgtgtcgctcttccgcatccgcaccatcatgaagcacgacggcaccaagaccgaaaagctggagcggctcatggtgcgcatcggcgtcttctccgtgctctacacagtgcccgccaccatcgtcatcgcttgctacttctacgagcaggccttccgcgagcactgggagcgctcgtgggtgagccagcactgcaagagcctggccatcccgtgcccggcgcactacacgccgcgcatgtcgcccgacttcacggtctacatgatcaaatacctcatgacgctcatcgtgggcatcacgtcgggcttctggatctggtcgggcaagacgctgcactcgtggaggaagttctacactcgcctcaccaacagccgacacggtgagaccaccgtgtgagggacgcccccaggccggaaccgcgcggcgctttcctccgcccggggtggggcccctacagactccgtattttatttttttaaataaaaaacgatcgaaaccatttcacttttaggttgctttttaaaagagaactctctgcccaacaccccc

SEQ ID NO: 271 - DNA, 3933 bp, Homo sapiens
gccgctccgggtacctgagggacgcgcggccgcccgcggcaggcggtgcagcccccccaccccttggagccaggcgccggggtctgaggatagcatttctcaagacctgacttatggagcacttgtaacctgagatatttcagttgaaggaagaaatagctcttctcctaagatggaatctgtggtttgggaatgtggttgatcaacttgatatgttggccaaatgtgccccatgtaataaaatgaaaagaagagacaagatgatgtcattttcccatattgtgaaaccaaaaacaaacgccttttgtgagaccaagctaacaaacctctgacggtgcgaagagtatttaactgtttgaagaatttaacagtaagatacagaagaagtaccttcgagctgagacctgcaggtgtataaatatctaaaatacatattgaataggcctgatcatctgaatctccttcagacccaggaaggatggctatgacttggattgtcttctctctttggcccttgactgtgttcatggggcatataggtgggcacagtttgttttcttgtgaacctattaccttgaggatgtgccaagatttgccttataatactaccttcatgcctaatcttctgaatcattatgaccaacagacagcagctttggcaatggagccattccaccctatggtgaatctggattgttctcgggatttccggccttttctttgtgcactctacgctcctatttgtatggaatatggacgtgtcacacttccctgtcgtaggctgtgtcagcgggcttacagtgagtgttcgaagctcatggagatgtttggtgttccttggcctgaagatatggaatgcagtaggttcccagattgtgatgagccatatcctcgacttgtggatctgaatttagctggagaaccaactgaaggagccccagtggcagtgcagagagactatggtttttggtgtccccgagagttaaaaattgatcctgatctgggttattcttttctgcatgtgcgtgattgttcacctccttgtccaaatatgtacttcagaagagaagaactgtcatttgctcgctatttcataggattgatttcaatcatttgcctctcggccacattgtttacttttttaacttttttgattgatgtcacaagattccgttatcctgaaaggcctattatattttatgcagtctgctacatgatggtatccttaattttcttcattggatttttgcttgaagatcgagtagcctgcaatgcatccatccctgcacaatataaggcttccacagtgacacaaggatctcataataaagcctgtaccatgctttttatgatactctatttttttactatggctggcagtgtatggtgggtaattcttaccatcacatggtttttagcagctgtgccaaagtggggtagtgaagctattgagaagaaagcattgctgtttcacgccagtgcatggggcatccccggaactctaaccatcatccttttagcgatgaataaaattgaaggtgacaatattagtggcgtgtgttttgttggcctctacgatgttgatgcattgagatattttgttcttgctcccctctgcctgtatgtggtagttggggtttctctcctcttagctggcattatatccctaaacagagttcgaattgagattccattagaaaaggagaaccaagataaattagtgaagtttatgatccggatcggtgttttcagcattctttatctcgtaccactcttggttgtaattggatgctacttttatgagcaagcttaccggggcatctgggaaacaacgtggatacaagaacgctgcagagaatatcacattccatgtccatatcaggttactcaaatgagtcgtccagacttgattctctttctgatgaaatacctgatggctctcatagttggcattccctctgtattttgggttggaagcaaaaagacatgctttgaatgggccagtttttttcatggtcgtaggaaaaaagagatagtgaatgagagccgacaggtactccaggaacctgattttgctcagtctctcctgagggatccaaatactcctatcataagaaagtcaaggggaacttccactcaaggaacatccacccatgcttcttcaactcagctggctatggtggatgatcaaagaagcaaagcaggaagcatccacagcaaagtgagcagctaccacggcagcctccacagatcacgtgatggcaggtacacgccctgcagttacagaggaatggaggagagactacctcatggcagcatgtcacgactaacagatcactccaggcatagtagttctcatcggctcaatgaacagtcacgacatagcagcatcagagatctcagtaataatcccatgactcatatcacacatggcaccagcatgaatcgggttattgaagaagatggaaccagtgcttaatttgtcttgtctaaggtggaaatcttgtgctgtttaaaaagcagattttattctttgccttttgcatgactgatagctgtaactcacagttaacatgctttcagtcaagtacagattgtgtccactggaaaggtaaatgattgcttttttatattgcatcaaacttggaacatcaaggcatccaaaacactaagaattctatcatcacaaaaataattcgtctttctaggttatgaagagataattatttgtctggtaagcatttttataaacccactcattttatatttagaaaaatcctaaatgtgtggtgactgctttgtagtgaactttcatatactataaactagttgtgagataacattctggtagctcagttaataaaacaatttcagaattaaagaaattttctatgcaaggtttacttctcagatgaacagtaggactttgtagttttatttccactaagtgaaaaaagaactgtgtttttaaactgtaggagaatttaataaatcagcaagggtattttagctaatagaataaaagtgcaacagaagaatttgattagtctatgaaaggttctcttaaaattctatcgaaataatcttcatgcagagatattcagggtttggattagcagtggaataaagagatgggcattgtttcccctataattgtgctgtttttataacttttgtaaatattactttttctggctgtgtttttataacttatccatatgcatgatggaaaaattttaatttgtagccatcttttcccatgtaatagtattgattcatagagaacttaatgttcaaaatttgctttgtggaggcatgtaataagataaacatcatacattataaggtaaccacaattacaaaatggcaaaacattttctctgtattcattgttgtatttttctacagtgagatgtgatcttgccaaagccaccagaccttggcttccaggccctcctgtagtgagttgattgtctgcacttgccttgcccaatagccagtaggctacagcttttgccccacacccttattttcagattctggatcattcttgtttacaactgaaatatatataacctcagtccaaagtggtgattgatttgagtatttgaaaattgttgtagctaaatgaagcatgattagtcttagtatgaatatcatttaatctttaaaaaatcaagtaaaaatgtttatctgataatgtttaaataatttacaatataaactgtaaaacttattaggcatgaaatcaatcagaagagaaagaaaaatgctggaacatgcttgatgtattatgtaaaaagcatatttaaacaagggtcctcaaccctgactgcagataagaatcacttgggttacttcagatgcctaacaccttcctctcatacaaataagaattggtagctttcttaaaaaaaaaaaaaaaaaaaaaaa

SEQ ID NO: 272 - DNA, 3131 bp, Homo sapiens
agtgtttatcagaacttagccagggccagccaagcaggcacagatgctctgctatgaaatgccacgcaggcagagactgacaagcggtaggaactgagctttccccttggactgctgcttcctgctgtgttcaggggagggggtcactttctggcaactctgctgctgctgctgctgctgctgctacttcagcttcctctccactcaaggtaagcaggctaagggagggcaggctgctagggaaagctttgtaccatgaacaggatccgaaagtttttccgaggaagtgggcgagtcttggcatttatctttgtagcttctgtcatctggctcctctttgacatggcagctctccgcctctcattcagtgagatcaacactcgggtcatcaaggaagacattgtgaggagggagcggataggattcagagttcagccagaccaaggaaaaattttttacagcagcataaaagagatgaaacctcccctaaggggacatgggaaaggggcatggggcaaagagaatgttagaaaaactgaggagagtgtgctcaaggttgaggtggacttggaccaaacccagagggaaagaaaaatgcagaatgccctgggaaggggcaaggttgtgccgttgtggcatcctgcacatctgcagaccctccctgtgactcctaacaagcagaagacagacgggagaggcaccaaacctgaagcctcctctcaccaggggacaccaaagcaaacgacagctcagggggctccaaagacctcattcatagcagcaaaaggaactcaggtagtcaaaatatcagtacacatgggacgtgtcagtttaaaacaggagccccggaagagtcatagtcccagcagtgacacatcaaaactagcagctgaaagggacttgaatgtgaccatcagtcttagtactgatagaccaaagcagcgatcacaggcagtagcaaacgagagggcacaccctgccagcacagcagtgccgaagtctggggaagccatggccttaaacaaaactaagactcagagcaaagaagtcaatgcaaataaacacaaagccaatacgagtcttccttttcctaagttcactgtcaattcaaatcgcttaaggaagcaatctattaatgagacacctttgggaagtttgtcaaaggatgatggagctagaggggctcatgggaagaaactcaatttctctgaaagccatcttgtgattataaccaaagaggaagagcaaaaggcagaccccaaagaggtctctaattctaaaaccaaaacaatatttcctaaagtattgggtaaaagccaaagtaaacacatttccaggaatagaagtgagatgtcttcctcttcacttgctccacatagagtgccactgtcccaaactaaccatgctttaactggagggctagagccagcaaaaatcaacataactgccaaagccccctctacagaatacaaccagagtcatataaaagcccttttacctgaagacagtggaacgcaccaggtgttaagaattgatgtgacactttctccaagggaccccaaagctccagggcagtttgggcgtcctgtagttgtcccccatggaaaggagaaggaggcagaaagaagatggaaagaaggaaacttcaatgtctaccttagcgatttgatcccagtggatagagccattgaagacaccagacctgctggatgtgcagagcagctagttcacaataacctcccaaccaccagtgtcatcatgtgctttgtggatgaagtgtggtccactctcctgagatctgttcacagtgtcatcaatcgctctcctccacacctcatcaaggagattctgctggtagatgacttcagcaccaaagactatctaaaagataatttggataaatacatgtcccagtttccaaaagttcggattcttcgcctcaaagagagacatggcttaataagggccaggctggcaggagcacagaatgcaacaggtgatgtgttgacatttttagattctcatgtggaatgtaacgttggttggttggaacctcttctggaaagagtttatttaagtagaaagaaagtggcctgtccagtaatcgaagtcatcaatgataaggatatgagttacatgacagtggataactttcaaagaggcatctttgtgtggcccatgaactttggttggagaacaattcctccagatgtcattgcaaaaaacagaattaaagaaactgatacaataaggtgccctgtcatggctggtggattgttttctattgacaaaagttacttttttgaacttggaacatacgaccctggccttgatgtttggggtggggaaaatatggagctctcattcaaggtgtggatgtgtggtggtgaaattgagatcattccctgctcccgagtgggccatatattcagaaatgacaatccatattccttccccaaagaccggatgaagacagtggagcggaacttggtgcgggttgccgaggtctggctggatgagtataaggagctgttctatggccacggagaccacctcatcgaccaagggctagatgttggcaacctcacccagcaaagggagctgcgaaagaaactgaagtgcaaaagtttcaaatggtacttggagaatgtctttcctgacttaagggctcccattgtgagagctagtggtgtgcttattaatgtggctttgggtaaatgcatttccattgaaaacactacagtcattctggaagactgcgatgggagcaaagagcttcaacaatttaattacacctggttaagacttattaaatgtggagaatggtgtatagcccccatccctgataaaggagccgtaaggctgcacccttgtgataacagaaacaaagggctaaaatggctgcataaatcaacatcagtctttcatccagaactggtgaatcacattgtttttgaaaacaatcagcaattattatgcttggaaggaaatttttctcaaaagatcctgaaagtagctgcctgtgacccagtgaagccatatcaaaagtggaaatttgaaaaatattatgaagcctgaagtgtaactgatgtttttatatagtaaacccattaaatactgtgaaaataaca

SEQ ID NO: 273 - DNA, 2881 bp, Homo sapiens
acagaagtgctagaagccagtgctcgtgaactaaggagaaaaagaacagacaagggaacagcctggacatggcatcagagatccacatgacaggcccaatgtgcctcattgagaacactaatgggcgactgatggcgaatccagaagctctgaagatcctttctgccattacacagcctatggtggtggtggcaattgtgggcctctaccgcacaggcaaatcctacctgatgaacaagctggctggaaagaaaaagggcttctctctgggctccacggtgcagtctcacactaaaggaatctggatgtggtgtgtgccccaccccaagaagccaggccacatcctagttctgctggacaccgagggtctgggagatgtagagaagggtgacaaccagaatgactcctggatcttcgccctggccgtcctcctgagcagcaccttcgtgtacaatagcataggaaccatcaaccagcaggctatggaccaactgtactatgtgacagagctgacacatagaatccgatcaaaatcctcacctgatgagaatgagaatgaggttgaggattcagctgactttgtgagcttcttcccagactttgtgtggacactgagagatttctccctggacttggaagcagatggacaacccctcacaccagatgagtacctgacatactccctgaagctgaagaaaggtaccagtcaaaaagatgaaacttttaacctgcccagactctgtatccggaaattcttcccaaagaaaaaatgctttgtctttgatcggcccgttcaccgcaggaagcttgcccagctcgagaaactacaagatgaagagctggaccccgaatttgtgcaacaagtagcagacttctgttcctacatctttagtaattccaaaactaaaactctttcaggaggcatccaggtcaacgggcctcgtctagagagcctggtgctgacctacgtcaatgccatcagcagtggggatctgccgtgcatggagaacgcagtcctggccttggcccagatagagaactcagctgcagtgcaaaaggctattgcccactatgaacagcagatgggccagaaggtgcagctgcccacagaaagcctccaggagctgctggacctgcacagggacagtgagagagaggccattgaagtcttcatcaggagttccttcaaagatgtggaccatctatttcaaaaggagttagcggcccagctagaaaaaaagcgggatgacttttgtaaacagaatcaggaagcatcatcagatcgttgctcaggtttacttcaggtcattttcagtcctctagaagaagaagtgaaggcgggaatttattcgaaaccagggggctatcgtctctttgttcagaagctacaagacctgaagaaaaagtactatgaggaaccgaggaaggggatacaggctgaagagattctgcagacatacttgaaatccaaggagtctatgactgatgcaattctccagacagaccagactctcacagaaaaagaaaaggagattgaagtggaacgtgtgaaagctgagtctgcacaggcttcagcaaaaatgttgcaggaaatgcaaagaaagaatgagcagatgatggaacagaaggagaggagttatcaggaacacttgaaacaactgactgagaagatggagaacgacagggtccagttgctgaaagagcaagagaggaccctcgctcttaaacttcaggaacaggagcaactactaaaagagggatttcaaaaagaaagcagaataatgaaaaatgagatacaggatctccagacgaaaatgagacgacgaaaggcatgtaccataagctaaagaccagagccttcctgtcacccctaaccaaggcataattgaaacaattttagaatttggaacaagcgtcactacatttgataataattagatcttgcatcataacaccaaaagtttataaaggcatgtggtacaatgatcaaaatcatgttttttcttaaaaaaaaaaaaaagactgtaaattgtgcaacaaagatgcatttacctctgtatcaactcaggaaatctcataagctggtaccactcaggagaagtttattcttccagatgaccagcagtagacaaatggatactgagcagagtcttaggtaaaagtcttgggaaatatttgggcattggtctggccaagtctacaatgtcccaatatcaaggacaaccaccctagcttcttagtgaagacaatgtacagttatccattagatcaagactacacggtctatgagcaataatgtgatttctggacattgcccatgtataatcctcactgatgatttcaagctaaagcaaaccaccttatacagagatctagaatctctttatgttctccagaggaaggtggaagaaaccatgggcaggagtaggaattgagtgataaacaattgggctaatgaagaaaacttctcttattgttcagttcatccagattataacttcaatgggacactttagaccattagacaattgacactggattaaacaaattcacataatgccaaatacacaatgtatttatagcaacgtataatttgcaaagatggactttaaaagatgctgtgtaactaaactgaaataattcaattacttattatttagaatgttaaagcttatgatagtcttttctaattcttaacactcatacttgaaatctttccgagtttccccagaagagaatatgggattttttttgacatttttgacccatttaataatgctcttgtgtttacctagtatatgtagactttgtcttatgtgtcaaaagtcctaggaaagtggttgatgtttcttatagcaattaaaaattatttttgaactga

SEQ ID NO: 274 - DNA, 2431 bp, Homo sapiens
ctccaggctgtggaacctttgttctttcactctttgcaataaatcttgctgctgctcactctttgggtccacactgcctttatgagctgtaacactcactgggaatgtctgcagcttcactcctgaagccagcgagaccacgaacccaccaggaggaacaaacaactccagacgcgcagccttaagagctgtaacactcaccgcgaaggtctgcagcttcactcctgagccagccagaccacgaacccaccagaaggaagaaactccaaacacatccgaacatcagaaggagcaaactcctgacacgccacctttaagaaccgtgacactcaacgctagggtccgcggcttcattcttgaagtcagtgagaccaagaacccaccaattccggacacgctaattgttgtagatcatcacttcaaggtgcccatatctttctagtggaaaaattattctggcctccgctgcatacaaatcaggcaaccagaattctacatatataaggcaaagtaacatcctagacatggctttagagatccacatgtcagaccccatgtgcctcatcgagaactttaatgagcagctgaaggttaatcaggaagctttggagatcctgtctgccattacgcaacctgtagttgtggtagcgattgtgggcctctatcgcactggcaaatcctacctgatgaacaagctggctgggaagaacaagggcttctctgttgcatctacggtgcagtctcacaccaagggaatttggatatggtgtgtgcctcatcccaactggccaaatcacacattagttctgcttgacaccgagggcctgggagatgtagagaaggctgacaacaagaatgatatccagatctttgcactggcactcttactgagcagcacctttgtgtacaatactgtgaacaaaattgatcagggtgctatcgacctactgcacaatgtgacagaactgacagatctgctcaaggcaagaaactcacccgaccttgacagggttgaagatcctgctgactctgcgagcttcttcccagacttagtgtggactctgagagatttctgcttaggcctggaaatagatgggcaacttgtcacaccagatgaatacctggagaattccctaaggccaaagcaaggtagtgatcaaagagttcaaaatttcaatttgccccgtctgtgtatacagaagttctttccaaaaaagaaatgctttatctttgacttacctgctcaccaaaaaaagcttgcccaacttgaaacactgcctgatgatgagctagagcctgaatttgtgcaacaagtgacagaattctgttcctacatctttagccattctatgaccaagactcttccaggtggcatcatggtcaatggatctcgtctaaagaacctggtgctgacctatgtcaatgccatcagcagtggggatctgccttgcatagagaatgcagtcctggccttggctcagagagagaactcagctgcagtgcaaaaggccattgcccactatgaccagcaaatgggccagaaagtgcagctgcccatggaaaccctccaggagctgctggacctgcacaggaccagtgagagggaggccattgaagtcttcatgaaaaactctttcaaggatgtagaccaaagtttccagaaagaattggagactctactagatgcaaaacagaatgacatttgtaaacggaacctggaagcatcctcggattattgctcggctttacttaaggatatttttggtcctctagaagaagcagtgaagcagggaatttattctaagccaggaggccataatctcttcattcagaaaacagaagaactgaaggcaaagtactatcgggagcctcggaaaggaatacaggctgaagaagttctgcagaaatatttaaagtccaaggagtctgtgagtcatgcaatattacagactgaccaggctctcacagagacggaaaaaaagaagaaagaggcacaagtgaaagcagaagctgaaaaggctgaagcgcaaaggttggcggcgattcaaaggcagaacgagcaaatgatgcaggagagggagagactccatcaggaacaagtgagacaaatggagatagccaaacaaaattggctggcagagcaacagaaaatgcaggaacaacagatgcaggaacaggctgcacagctcagcacaacattccaagctcaaaatagaagccttctcagtgagctccagcacgcccagaggactgttaataacgatgatccatgtgttttactctaaagtgctaaatatgggagtttcctttttttactctttgtcactgatgacacaacagaaaagaaactgtagaccttgggacaatcaacatttaaataaactttataattattttttcaaactttaaaaaaaaaaaaaaaaaaaaaaaa

SEQ ID NO: 275 - DNA, 4691 bp, Homo sapiens
agtaagctcttgttttgaaaaacagtggggtggggccaaaaaagcattacaatggagctgggatggatgaggctttcttttatttgagatgtcacttgtgtcacgtttcctgaaacagcacgttggaaaacagaagctattttctatcccgtgggttgcgctggaagagctgagaggccaggctgtggatccttgccacgaacaacaagagagggcaagtccagccgcctgctaggggactagcaggaagcggcacgcctgccagagctcatcacttcaactctggctttcactgcgctcattccctgaatggcagtaaccagggggcgggggtggcatgggaaatgaaagaaagagatatgggaaactaaatctgccgggggaaagagagttaccggagttttagcaaaacagctagcagatgcaaacggggaggcagagggaggagggaaggctgggcttcagcaacctgccacggggatttaaacaaaggaggtttgagagaggcgggatctggctgtaatatcggcacagggacagagacagcagctggactctcgggatgaaacggaatcgattcccagcgtctccaacagggcaggagtgagtggagtatgttgcaaaataagaactcagagaaacgagtgagtttggaaaaaagacttacagattttgacggtctcttgacatttcacccttctttgaggcatgcctttatcaatgcgttacctcttcataatttctgtctctagtgtaattatttttatcgtcttctctgtgttcaattttgggggagatccaagcttccaaaggctaaatatctcagaccctttgaggctgactcaagtttgcacatcttttatcaatggaaaaacacgtttcctgtggaaaaacaaactaatgatccatgagaagtcttcttgcaaggaatacttgacccagagccactacatcacagcccctttatctaaggaagaagctgactttcccttggcatatataatggtcatccatcatcactttgacacctttgcaaggctcttcagggctatttacatgccccaaaatatctactgtgttcatgtggatgaaaaagcaacaactgaatttaaagatgcggtagagcaactattaagctgcttcccaaacgcttttctggcttccaagatggaacccgttgtctatggagggatctccaggctccaggctgacctgaactgcatcagagatctttctgccttcgaggtctcatggaagtacgttatcaacacctgtgggcaagacttccccctgaaaaccaacaaggaaatagttcagtatctgaaaggatttaaaggtaaaaatatcaccccaggggtgctgcccccagctcatgcaattggacggactaaatatgtccaccaagagcacctgggcaaagagctttcctatgtgataagaacaacagcgttgaaaccgcctcccccccataatctcacaatttactttggctctgcctatgtggctctatcaagagagtttgccaactttgttctgcatgacccacgggctgttgatttgctccagtggtccaaggacactttcagtcctgatgagcatttctgggtgacactcaataggattccaggtgttcctggctctatgccaaatgcatcctggactggaaacctcagagctataaagtggagtgacatggaagacagacacggaggctgccacggccactatgtacatggtatttgtatctatggaaacggagacttaaagtggctggttaattcaccaagcctgtttgctaacaagtttgagcttaatacctacccccttactgtggaatgcctagaactgaggcatcgcgaaagaaccctcaatcagagtgaaactgcgatacaacccagctggtatttttgagctattcatgagctactcatgactgaagggaaactgcagctgggaagaggagcctgtttttgtgagagacttttgccttcgtaatgttaaccgtttcaggaccacgtttatagcttcaggacctggctacgtaattatacttaaaatatccactggacactgtgaaatacactaacaggatggctgggtagagcaatctgggcactttggccaattttagtcttgctgtttcttgatgctcacctctatattagtttattgttaggatcaatgataaatttaaatgacctcagatctttgcaccagatactcatcatatacaaatgttttagtaaaaaagagaattgtagataatactgtctaggaaaataagaattaggtttctttgaagaaggaatcttttataacaccttaacagtcaccactgtgctcaaccagacagatagtgaaacagctttctgggtaattcaccaatttcctttaaaacataagctacctgaatggagaatacatcttgtttctgagtttcaacactagcatttttggcttactcatggacaaagttctgtatatagtataaagtcattaacaagaaacaggatatgctttaagacagaattcactgtctgttgcttcagtaaaaggacctcggggaataaaacatttctctcttatatgccagaatgtaggctggtccctatgtcatgtcttccattaagaacactaaaaagtccttgcaagaatggagatatgcattcaagagaggtgctatcacatagatctagtctgaagtctggaacactttcctcttctatgacccctctctccccagtattatcttacttgcaaaatggagaccaaattctatcctgtgaggcttttaattgcaccatagtatgctctgagtagctttacactgcctggtactgatagtagtggctcgatttttaagagccttcaattgtagatgaacatctctgttatttatccctcattcatccatccgttcattcattcagccttcaatcaacatctcttgagtgtctattatgtacaggacatgtactgagacaaaaaggaaacataagagctttttcactctaaaaatcttggcaataatgtcaacaccagaaagcctcctctggagaatcttacagagtgattgtagtttaatacaggaacacacagggctgtgtagcatgataccaggcccaggagatcagtaattacaaattaagggttaaatcagagattattcaacagagagggagaaaggaggagacagagggaggacctgttgtgttccagccattctggtattcctttatgtatctaatttcattcaaacctcacaacagtcttgtgaggcccttatataattactcccattttgcagatgaagtaactgaggcttagaaaggttaatagcaccggggaacaatttctctgggtgagaattgggactctgttgctggtcttctcagttcatttcctgaggtggatttactgagagaaggtgaaataaagccatatttagtataccagagaaggtagattttaagaatggtctcagtgttaatactgagaaaaagtcctgtcagttcagaaaaaatgtgaagtctactttagtattcctgtaatactaaaccgttgagtttctaaatatttatttattctaacaaaaagcaattactacaaatggatgacacatttaatgaacacaattttattttttttctgtaactgtgcttgttgaatgtcaatcatatttaaagggaatgactttgaagtaaaaccttttttcttgctactgaaaaaaatggagttgttttgggtggtaaagtgttaaggaatagggacagctggtcacacaaggaactcttgaaggccacatgtgaaaacctgtcacttgcacagaggccagtcccactaaggtgaccagagtgggctccaagcacaaactgccattggctatagatgggactgtgtccccccaaaattcatgtgttggagccttaaccctcaatgtgatggtatttgagatggggcctttggtaagggaagtttagatgaggtcacgagggtaggaccctcatgatgggatgagtccccttacaagacctctggcttgggccgggcgtggtggctcacacctgtaatcccaacactttgggaggccaaggcaggtagatcacttgatgccaggagttccagaccaggctggccgacatggtgaaaccccatctctactaaaaaatataaaaattagccgggctttgtggcatgtgcctgtaatcccagctatttggcaggctgaggcatgagaatcgcttgaacccaggaggtggaggttacagtgagctgagagtgccccactgcactccagcctgggtgacagagcgagactttgtcccaaaacaaaataggtgaggggatagcgaatgcactcagggtcagcagtggagtttaaaaattgtctcttttcaacttatttaaatgacagcacctgagaagaggaaccgttttacactggatgtttctcatgtagaacaagaaatctttctggaattgatgtttacatgtctgttgttggtcatctctcctgtgtcttaaatactttaatgttggaagagcatagtgtttgggctagtgggtttctgacagcccatgggaatgccctgaaactactgtatctgatgtttgttttcgatgaggttccatgttttgttttcttgggaataaattaatatattgttttccaaaaaaaaaaaaaaaaaaaa

SEQ ID NO: 276 - DNA, 4219 bp, Homo sapiens
gcagaccaaagtgagagagggacgcaccgcatctccaggcacatccaaaaaggatggacgagacaccgaagcagaggatacaggaggattaaaggattcaggaaagcaagcagccctccggagaagctgtcgaaattcaagactggcaagagaagcaaattcaacctctcacaccgatcatttctcattccctgaaaagaagagattgtttccccagggaagtgaaaataatgaacttttggaggtactgcttttttgctttcactctgctcagcgtggtcatttttgtgagattttacagtagccaattgagcccgccaaaaagttatgagaagctgaacagttccagtgaaaggtattttaggaaaactgcctgtaatcacgccttagagaaaatgccagtctttttgtgggaaaatatattaccatcacctttgcgaagtgtcccttgcaaggattacctgacccagaatcactacatcacaagtcccctgtcggaagaagaggctgcattccctttggcctatgtcatggtcatccataaggactttgacacctttgaaaggctctttagggctatctatatgccccaaaatgtctactgtgttcacgtggatgagaaagccccagctgagtataaggaatctgtgaggcagttactgagttgcttccaaaatgctttcattgcttcaaagacagagtctgtggtttatgcaggcatttccagactccaggctgacctgaactgtctgaaagaccttgtcgcctctgaggttccctggaagtacgtcatcaacacctgtggacaagacttccccctgaaaaccaaccgggagatagttcagcatctgaaaggatttaaagggaaaaatatcaccccaggggtgctgcctcctgaccatgcaattaagcgaactaaatatgtccaccaagagcatacagataaaggtggcttttttgtgaaaaatactaatattttgaaaacttcacctccacatcagctgaccatctactttggcactgcctatgtggcgcttaccagagactttgtcgactttgttctacgtgaccaaagggccattgatctactacaatggtcaaaagatacctatagtcctgatgagcatttctgggtgacacttaatagggtttcaggtgttcctggctctatgccaaatgcatcctggactggaaacctcagagctataaagtggagtgacatggaagacagacacggaggctgccacggccactatgtacatggtatttgtatctatggaaacggagacttaaagtggctggttaattcaccaagcctgtttgctaacaagtttgagcttaatacctacccccttactgtggaatgcctagaactgaggcatcgcgaaagaaccctcaatcagagtgaaactgcgatacaacccagctggtatttttgagctattcatgagctactcatgactgaagggaaactgcagctgggaagaggagcctgtttttgtgagagacttttgccttcgtaatgttaaccgtttcaggaccacgtttatagcttcaggacctggctacgtaattatacttaaaatatccactggacactgtgaaatacactaacaggatggctgggtagagcaatctgggcactttggccaattttagtcttgctgtttcttgatgctcacctctatattagtttattgttaggatcaatgataaatttaaatgacctcagatctttgcaccagatactcatcatatacaaatgttttagtaaaaaagagaattgtagataatactgtctaggaaaataagaattaggtttctttgaagaaggaatcttttataacaccttaacagtcaccactgtgctcaaccagacagatagtgaaacagctttctgggtaattcaccaatttcctttaaaacataagctacctgaatggagaatacatcttgtttctgagtttcaacactagcatttttggcttactcatggacaaagttctgtatatagtataaagtcattaacaagaaacaggatatgctttaagacagaattcactgtctgttgcttcagtaaaaggacctcggggaataaaacatttctctcttatatgccagaatgtaggctggtccctatgtcatgtcttccattaagaacactaaaaagtccttgcaagaatggagatatgcattcaagagaggtgctatcacatagatctagtctgaagtctggaacactttcctcttctatgacccctctctccccagtattatcttacttgcaaaatggagaccaaattctatcctgtgaggcttttaattgcaccatagtatgctctgagtagctttacactgcctggtactgatagtagtggctcgatttttaagagccttcaattgtagatgaacatctctgttatttatccctcattcatccatccgttcattcattcagccttcaatcaacatctcttgagtgtctattatgtacaggacatgtactgagacaaaaaggaaacataagagctttttcactctaaaaatcttggcaataatgtcaacaccagaaagcctcctctggagaatcttacagagtgattgtagtttaatacaggaacacacagggctgtgtagcatgataccaggcccaggagatcagtaattacaaattaagggttaaatcagagattattcaacagagagggagaaaggaggagacagagggaggacctgttgtgttccagccattctggtattcctttatgtatctaatttcattcaaacctcacaacagtcttgtgaggcccttatataattactcccattttgcagatgaagtaactgaggcttagaaaggttaatagcaccggggaacaatttctctgggtgagaattgggactctgttgctggtcttctcagttcatttcctgaggtggatttactgagagaaggtgaaataaagccatatttagtataccagagaaggtagattttaagaatggtctcagtgttaatactgagaaaaagtcctgtcagttcagaaaaaatgtgaagtctactttagtattcctgtaatactaaaccgttgagtttctaaatatttatttattctaacaaaaagcaattactacaaatggatgacacatttaatgaacacaattttattttttttctgtaactgtgcttgttgaatgtcaatcatatttaaagggaatgactttgaagtaaaaccttttttcttgctactgaaaaaaatggagttgttttgggtggtaaagtgttaaggaatagggacagctggtcacacaaggaactcttgaaggccacatgtgaaaacctgtcacttgcacagaggccagtcccactaaggtgaccagagtgggctccaagcacaaactgccattggctatagatgggactgtgtccccccaaaattcatgtgttggagccttaaccctcaatgtgatggtatttgagatggggcctttggtaagggaagtttagatgaggtcacgagggtaggaccctcatgatgggatgagtccccttacaagacctctggcttgggccgggcgtggtggctcacacctgtaatcccaacactttgggaggccaaggcaggtagatcacttgatgccaggagttccagaccaggctggccgacatggtgaaaccccatctctactaaaaaatataaaaattagccgggctttgtggcatgtgcctgtaatcccagctatttggcaggctgaggcatgagaatcgcttgaacccaggaggtggaggttacagtgagctgagagtgccccactgcactccagcctgggtgacagagcgagactttgtcccaaaacaaaataggtgaggggatagcgaatgcactcagggtcagcagtggagtttaaaaattgtctcttttcaacttatttaaatgacagcacctgagaagaggaaccgttttacactggatgtttctcatgtagaacaagaaatctttctggaattgatgtttacatgtctgttgttggtcatctctcctgtgtcttaaatactttaatgttggaagagcatagtgtttgggctagtgggtttctgacagcccatgggaatgccctgaaactactgtatctgatgtttgttttcgatgaggttccatgttttgttttcttgggaataaattaatatattgttttccaaaaaaaaaaaaaaaaaaaa

SEQ ID NO: 277 - DNA, 4423 bp, Homo sapiens
gttactagactctggccgggacaagaggctgaggttaaggtcttagagccgatgacttgcagaatggtcacctcacccacttgtaatttcatggtgggaacaggtggaccccctggaatcagaacctctctgaggacatctgtttttgtgtagacacaggttgcaggttagcaggagaacaggcaagccaaatgcaaaggagccacttcagaaatgtgtcacagaaaagtgaaaatgcaacctagtggtaagtgaagaggggaagaagaaagaaaaaggaccagaaccgtgaactgaagggacagggaacagccagacgagagcttcagccatcacgaggatgatttcggaacctggagaaaatgtaagttaaatatatctacactctgatcctatctcaagagagagatattttactcatttcctggttgtgaatgatgggctcttggaagcactgtctttttagcgcgtctcttatctctgccctgatttttgtatttgtttacaatactgagttatgggagaataaacgttttctgagggcagctctgtccaatgcttcactgttagcagaagcctgtcatcagatttttgaggggaaagttttttacccaacagaaaatgcattgaaaactacccttgatgaagctacctgctatgagtacatggttcgaagccactatgtaacagaaacactctctgaagaagaggctgggttccctttagcttacacagtgaccatccacaaagacttcggcacttttgagaggctcttcagggcgatttatatgccccaaaatgtctactgtgtgcacctggatcagaaggcgacggatgcctttaaaggtgcagtgaaacagttactcagctgcttcccaaatgcttttctggcttccaagaaggagtcggttgtctatggggggatctccaggctccaggctgacctgaactgcctggaagaccttgtggcctctgaagttccctggaagtatgtcatcaacacctgcgggcaagactttcccctgaaaaccaacagggaaatagttcagtatctgaagggatttaaagggaaaaatatcacccccggagtgctgcctcctgaccacgctgttggacggactaaatacgtccaccaagaactgttaaaccacaaaaattcctacgtgattaaaacaacaaaattaaaaactcctcctcctcatgacatggtgatttactttggcacggcctacgtggctctcacaagggactttgctaacttcgtcctccaagaccagctcgcacttgacttactctcctggtccaaggacacctacagccccgacgaacatttctgggtgacactcaacaggattcccggtgttcctggctctatgccaaatgcatcctggactggaaacctcagagctataaagtggagtgacatggaagacagacacggaggctgccacggccactatgtacatggtatttgtatctatggaaacggagacttaaagtggctggttaattcaccaagcctgtttgctaacaagtttgagcttaatacctacccccttactgtggaatgcctagaactgaggcatcgcgaaagaaccctcaatcagagtgaaactgcgatacaacccagctggtatttttgagctattcatgagctactcatgactgaagggaaactgcagctgggaagaggagcctgtttttgtgagagacttttgccttcgtaatgttaaccgtttcaggaccacgtttatagcttcaggacctggctacgtaattatacttaaaatatccactggacactgtgaaatacactaacaggatggctgggtagagcaatctgggcactttggccaattttagtcttgctgtttcttgatgctcacctctatattagtttattgttaggatcaatgataaatttaaatgacctcagatctttgcaccagatactcatcatatacaaatgttttagtaaaaaagagaattgtagataatactgtctaggaaaataagaattaggtttctttgaagaaggaatcttttataacaccttaacagtcaccactgtgctcaaccagacagatagtgaaacagctttctgggtaattcaccaatttcctttaaaacataagctacctgaatggagaatacatcttgtttctgagtttcaacactagcatttttggcttactcatggacaaagttctgtatatagtataaagtcattaacaagaaacaggatatgctttaagacagaattcactgtctgttgcttcagtaaaaggacctcggggaataaaacatttctctcttatatgccagaatgtaggctggtccctatgtcatgtcttccattaagaacactaaaaagtccttgcaagaatggagatatgcattcaagagaggtgctatcacatagatctagtctgaagtctggaacactttcctcttctatgacccctctctccccagtattatcttacttgcaaaatggagaccaaattctatcctgtgaggcttttaattgcaccatagtatgctctgagtagctttacactgcctggtactgatagtagtggctcgatttttaagagccttcaattgtagatgaacatctctgttatttatccctcattcatccatccgttcattcattcagccttcaatcaacatctcttgagtgtctattatgtacaggacatgtactgagacaaaaaggaaacataagagctttttcactctaaaaatcttggcaataatgtcaacaccagaaagcctcctctggagaatcttacagagtgattgtagtttaatacaggaacacacagggctgtgtagcatgataccaggcccaggagatcagtaattacaaattaagggttaaatcagagattattcaacagagagggagaaaggaggagacagagggaggacctgttgtgttccagccattctggtattcctttatgtatctaatttcattcaaacctcacaacagtcttgtgaggcccttatataattactcccattttgcagatgaagtaactgaggcttagaaaggttaatagcaccggggaacaatttctctgggtgagaattgggactctgttgctggtcttctcagttcatttcctgaggtggatttactgagagaaggtgaaataaagccatatttagtataccagagaaggtagattttaagaatggtctcagtgttaatactgagaaaaagtcctgtcagttcagaaaaaatgtgaagtctactttagtattcctgtaatactaaaccgttgagtttctaaatatttatttattctaacaaaaagcaattactacaaatggatgacacatttaatgaacacaattttattttttttctgtaactgtgcttgttgaatgtcaatcatatttaaagggaatgactttgaagtaaaaccttttttcttgctactgaaaaaaatggagttgttttgggtggtaaagtgttaaggaatagggacagctggtcacacaaggaactcttgaaggccacatgtgaaaacctgtcacttgcacagaggccagtcccactaaggtgaccagagtgggctccaagcacaaactgccattggctatagatgggactgtgtccccccaaaattcatgtgttggagccttaaccctcaatgtgatggtatttgagatggggcctttggtaagggaagtttagatgaggtcacgagggtaggaccctcatgatgggatgagtccccttacaagacctctggcttgggccgggcgtggtggctcacacctgtaatcccaacactttgggaggccaaggcaggtagatcacttgatgccaggagttccagaccaggctggccgacatggtgaaaccccatctctactaaaaaatataaaaattagccgggctttgtggcatgtgcctgtaatcccagctatttggcaggctgaggcatgagaatcgcttgaacccaggaggtggaggttacagtgagctgagagtgccccactgcactccagcctgggtgacagagcgagactttgtcccaaaacaaaataggtgaggggatagcgaatgcactcagggtcagcagtggagtttaaaaattgtctcttttcaacttatttaaatgacagcacctgagaagaggaaccgttttacactggatgtttctcatgtagaacaagaaatctttctggaattgatgtttacatgtctgttgttggtcatctctcctgtgtcttaaatactttaatgttggaagagcatagtgtttgggctagtgggtttctgacagcccatgggaatgccctgaaactactgtatctgatgtttgttttcgatgaggttccatgttttgttttcttgggaataaattaatatattgttttccaaaaaaaaaaaaaaaaaaaa

SEQ ID NO: 278 - DNA, 1115 bp, Homo sapiens
cccacactggctaggcaggcagcacagtcccgcggacggctgagcgtgtggctgcaggagcttctgtgggagtacggtcatgagccttttgctgtactatgccctccctgccctgggcagctatgccatgctctccatcttcttcctgcgccggcctcatctgctgcacacgcccagggctcccaccttccgcatccgcctgggggcccaccgaggaggatctggagagctgctggagaacaccatggaggccatggagaactccatggcccagcgctcggacctcctggagctcgactgtcagctgacacgggacagagtggtggtggtgtcacatgatgagaacctgtgccgccagtcgggcctaaacagggatgtgggcagcctggacttcgaggacctgcccctctacaaggagaagctggaggtttacttctctccaggccactttgctcacgggtcagaccggcgcatggttcgtctggaggacctgttccagaggtttccaaggacacccatgagcgtagagatcaaagggaagaacgaagagctcatccgtgagatagcaggcttggtgagacgctatgaccgtaatgaaatcaccatctgggcctcggagaagagctcggtcatgaagaaatgcaaggctgccaaccccgagatgcccctgtccttcacaataagccgaggattctgggtgctgctttcctactacctggggctgctgcccttcatcccaatccctgagaagttcttcttctgcttcctgcccaacatcatcaacaggacctatttcccattttcctgctcttgcctgaaccagttattggctgtggtttcgaaatggctgatcatgaggaagagtctgatccgacacttggaggagcgaggggtgcaggtggtcttttggtgccttaatgaagagtcggattttgaagcagccttcagcgtgggagccactggcgtcataacggattatcccacagccctgcggcactacctggacaaccatggaccagctgcccggacctcctaagtccagaagcctcgaggtctcctgtttctcttcctgaaaaataaatatttgcctttcgatcaaaaaaaaaaaaaaaaaa

SEQ ID NO: 279 - DNA, 1115 bp, Homo sapiens; identical to SEQ ID NO: 278

SEQ ID NO: 280 - DNA, 2205 bp, Homo sapiens
cggcggctgcaggcggcgggcaaggacggcgggcacagcgcagcactccccgctcgttggcccgggtatcccagcgcggacccacgcgatacgctgacgccccgacgccgatccggccgagccaagtaagggggacggcccgagacggagaagggagagagtgggagtttcccagcccgcagaactttcgaagttgagaaaagaacccctggaacgtgcgctcagcactgggattttctggactcaacgatgactctgaataatgtcaccatgcgccagggcactgtgggcatgcagccacagcagcagcgctggagcatcccagctgatggcaggcatctgatggtccagaaagagccccaccagtacagccaccgcaaccgccattctgctacccctgaggaccactgccgccgaagctggtcctctgactccacagactcagtcatctcctctgagtcagggaacacctactaccgagtggtgctcataggggagcagggggtgggcaagtccactctggccaacatctttgcaggtgtgcatgacagcatggacagcgactgcgaggtgctgggagaagatacatatgaacgaaccctgatggttgatggggaaagtgcaacgattatactcctggatatgtgggaaaataagggggaaaatgaatggctccatgaccactgcatgcaggtcggggacgcatacctgattgtctactcaatcacagaccgagcgagcttcgagaaggcatctgagctgcgaatccagctccgcagggcccggcagacagaggacattcccataattttggttggcaacaaaagtgacttagtgcggtgccgagaagtgtctgtatcagaagggagagcctgtgcagtggtgtttgactgcaagttcatcgagacctctgcagctgtccagcacaacgtgaaggagctgtttgagggcattgtgcgacaggtgcgccttcggcgggacagcaaggagaagaatgaacggcggctggcctaccagaaaaggaaggagagcatgcccaggaaagccaggcgcttctggggcaagatcgtggccaaaaacaacaagaatatggccttcaagctcaagtccaaatcctgccatgacctctctgtactctaggaacccagggtcacccagatgtccctttgatggccgttgttgaaggccattgggaccaataatctatattagattgaatacttaagttagatgtggtttcccccattgtagcagggagctagcgtattagccttgtgggcaacatgatgcatgggaaatgaaagatttttgtaaaaagtcagtatttatttccaggaaaagcctgaccttgctatttgaacacccaagactctttagaggatgtgtttggtgttcacatgtgtttcttctattttggatagtagagaagtaaagcttacaaagaatgcctagaacaagaacttttcatcattaaaaatttttcccagtgttctgatatgtgactttgaggccaatgagtcataaacaaatataagaaagctgtcaatgagtttcttcaaaggagggaaaactttctacgaatctaagatccatggagctagaattgtagaactaggctcatcagaatcgtgactattattgctccatcaaactgtgaaaagaaatgatgtggaccttgctggaaacaaaggcttagcaaacaatttttgttcaatgcccaccaagacatatagaattgggaactgatacatgtgtcccttataggctcaaaaattatatcttacaatttcttatttagggggaaattatttgaatcagattctatttagtcaaaccaccttttatgttttattatttttgaattcatggagccatcataaaaatatttttaaaatcagaattattgataccctgtagtgcaaaatgtcaatttttaatgtataatcagaagtctgaatttttataaaacatatagcataaaaacttccagtactttggttgacccttgtatgtcacagctctgctctatttattattattttgcaaaataaccattttaacatttgataaagcatatttatgaacatatttcttaataagaaaaatatccattttattaccattttctatctttttcaaaatatgcaagtttttacctatatgtcttataataaaagaaataaaatatttgaaaaaaaaaaaaaa

SEQ ID NO: 281 - DNA, 2090 bp, Homo sapiens
cggcggctgcaggcggcgggcaaggacggcgggcacagcgcagcactccccgctcgttggcccgggtatcccagcgcggacccacgcgatacgctgacgccccgacgccgatccggccgagccaagactcaacgatgactctgaataatgtcaccatgcgccagggcactgtgggcatgcagccacagcagcagcgctggagcatcccagctgatggcaggcatctgatggtccagaaagagccccaccagtacagccaccgcaaccgccattctgctacccctgaggaccactgccgccgaagctggtcctctgactccacagactcagtcatctcctctgagtcagggaacacctactaccgagtggtgctcataggggagcagggggtgggcaagtccactctggccaacatctttgcaggtgtgcatgacagcatggacagcgactgcgaggtgctgggagaagatacatatgaacgaaccctgatggttgatggggaaagtgcaacgattatactcctggatatgtgggaaaataagggggaaaatgaatggctccatgaccactgcatgcaggtcggggacgcatacctgattgtctactcaatcacagaccgagcgagcttcgagaaggcatctgagctgcgaatccagctccgcagggcccggcagacagaggacattcccataattttggttggcaacaaaagtgacttagtgcggtgccgagaagtgtctgtatcagaagggagagcctgtgcagtggtgtttgactgcaagttcatcgagacctctgcagctgtccagcacaacgtgaaggagctgtttgagggcattgtgcgacaggtgcgccttcggcgggacagcaaggagaagaatgaacggcggctggcctaccagaaaaggaaggagagcatgcccaggaaagccaggcgcttctggggcaagatcgtggccaaaaacaacaagaatatggccttcaagctcaagtccaaatcctgccatgacctctctgtactctaggaacccagggtcacccagatgtccctttgatggccgttgttgaaggccattgggaccaataatctatattagattgaatacttaagttagatgtggtttcccccattgtagcagggagctagcgtattagccttgtgggcaacatgatgcatgggaaatgaaagatttttgtaaaaagtcagtatttatttccaggaaaagcctgaccttgctatttgaacacccaagactctttagaggatgtgtttggtgttcacatgtgtttcttctattttggatagtagagaagtaaagcttacaaagaatgcctagaacaagaacttttcatcattaaaaatttttcccagtgttctgatatgtgactttgaggccaatgagtcataaacaaatataagaaagctgtcaatgagtttcttcaaaggagggaaaactttctacgaatctaagatccatggagctagaattgtagaactaggctcatcagaatcgtgactattattgctccatcaaactgtgaaaagaaatgatgtggaccttgctggaaacaaaggcttagcaaacaatttttgttcaatgcccaccaagacatatagaattgggaactgatacatgtgtcccttataggctcaaaaattatatcttacaatttcttatttagggggaaattatttgaatcagattctatttagtcaaaccaccttttatgttttattatttttgaattcatggagccatcataaaaatatttttaaaatcagaattattgataccctgtagtgcaaaatgtcaatttttaatgtataatcagaagtctgaatttttataaaacatatagcataaaaacttccagtactttggttgacccttgtatgtcacagctctgctctatttattattattttgcaaaataaccattttaacatttgataaagcatatttatgaacatatttcttaataagaaaaatatccattttattaccattttctatctttttcaaaatatgcaagtttttacctatatgtcttataataaaagaaataaaatatttgaaaaaaaaaaaaaa

SEQ ID NO: 282 - DNA, 2431 bp, Homo sapiens
gaccagaccgggcgtcgggtgagcccagaagtgagagcagttggctgtgccccagtgctgtgtgacccagaggcgccgctcaccctctctgagctggtggacatcatagcgggtgcagcccagaactgtcttctgaggaagaggtgctctcctgggcccccactgtccccaggcctcagcaaggcaagtgaggtgctgccgtcatccaggctggacagttcagtgatttgcctgaggccccacagcagagttcaactggagacagagaaaccagctagaggcagagggaggtaacacggagtcccccagaaaggtctgggctgcgcgtgcttcaggtaacctcccttgaccttcaggagaacgagaaggctgcctgatcagagagtccctgaagaagattctgtggctacaggcttcagcagagtgtgagggagaccccggttatttcctcagctatttccaccaaatcctcctgtctttcgtggccaacaccccaggcaaggcttggggcccccgtctgctgctggacgcagagccatgaagaagaagttagtggtgctgggcctgctggccgtggtcctggtgctggtcattgtcggcctctgtctctggctgccctcagcctccaaggaacctgacaaccatgtgtacaccagggctgccgtggccgcggatgccaagcagtgctcgaagattgggagggatgcactgcgggacggtggctctgcggtggatgcagccattgcagccctgttgtgtgtggggctcatgaatgcccacagcatgggcatcgggggtggcctcttcctcaccatctacaacagcaccacacgaaaagctgaggtcatcaacgcccgcgaggtggcccccaggctggcctttgccaccatgttcaacagctcggagcagtcccagaagggggggctgtcggtggcggtgcctggggagatccgaggctatgagctggcacaccagcggcatgggcggctgccctgggctcgcctcttccagcccagcatccagctggcccgccagggcttccccgtgggcaagggcttggcggcagccctggaaaacaagcggaccgtcatcgagcagcagcctgtcttgtgtgaggtgttctgccgggatagaaaggtgcttcgggagggggagagactgaccctgccgcagctggctgacacctacgagacgctggccatcgagggtgcccaggccttctacaacggcagcctcacggcccagattgtgaaggacatccaggcggccgggggcattgtgacagctgaggacctgaacaactaccgtgctgagctgatcgagcacccgctgaacatcagcctgggagacgtggtgctgtacatgcccagtgcgccgctcagcgggcccgtgctggccctcatcctcaacatcctcaaagggtacaacttctcccgggagagcgtggagagccccgagcagaagggcctgacgtaccaccgcatcgtagaggctttccggtttgcctacgccaagaggaccctgcttggggaccccaagtttgtggatgtgactgaggtggtccgcaacatgacctccgagttcttcgctgcccagctccgggcccagatctctgacgacaccactcacccgatctcctactacaagcccgagttctacacgccggatgacgggggcactgctcacctgtctgtcgtcgcagaggacggcagtgctgtgtccgccaccagcaccatcaacctctactttggctccaaggtccgctccccggtcagcgggatcctgttcaataatgaaatggacgacttcagctctcccagcatcaccaacgagtttggggtacccccctcacctgccaatttcatccagccagggaagcagccgctctcgtccatgtgcccgacgatcatggtgggccaggacggccaggtccggatggtggtgggagctgctgggggcacacagatcaccacggccactgcactggccatcatctacaacctctggttcggctatgacgtgaagcgggccgtggaggagccccggctgcacaaccagcttctgcccaacgtcacgacagtggagagaaacattgaccaggcagtgactgcagccctggagacccggcaccatcacacccagatcgcgtccaccttcatcgctgtggtgcaagccatcgtccgcacggctggtggctgggcagctgcctcggactccaggaaaggcggggagcctgccggctactgagtgctccaggaggacaaggctgacaagcaatccagggacaagatactcaccaggaccaggaaggggactctgggggaccggcttcccctgtgagcagcagagcagcacaataaatgaggccactgtgccaggctccaggtggcctccctggcctgtctccccactcaaaaaaaaaaaaaaaaaa

SEQ ID NO: 283 - DNA, 2320 bp, Homo sapiens
gaccagaccgggcgtcgggtgagcccagaagtgagagcagttggctgtgccccagtgctgtgtgacccagaggcgccgctcaccctctctgagctggtggacatcatagcgggtgcagcccagaactgtcttctgaggaagaggtgctctcctgggcccccactgtccccaggcctcagcaaggcaagtgaggtgctgccgtcatccaggctggacagttcagtgatttgcctgaggccccacagcaggagaacgagaaggctgcctgatcagagagtccctgaagaagattctgtggctacaggcttcagcagagtgtgagggagaccccggttatttcctcagctatttccaccaaatcctcctgtctttcgtggccaacaccccaggcaaggcttggggcccccgtctgctgctggacgagccatgaagaagaagttagtggtgctgggcctgctggccgtggtcctggtgctggtcattgtcggcctctgtctctggctgccctcagcctccaaggaacctgacaaccatgtgtacaccagggctgccgtggccgcggatgccaagcagtgctcgaagattgggagggatgcactgcgggacggtggctctgcggtggatgcagccattgcagccctgttgtgtgtggggctcatgaatgcccacagcatgggcatcgggggtggcctcttcctcaccatctacaacagcaccacacgaaaagctgaggtcatcaacgcccgcgaggtggcccccaggctggcctttgccaccatgttcaacagctcggagcagtcccagaagggggggctgtcggtggcggtgcctggggagatccgaggctatgagctggcacaccagcggcatgggcggctgccctgggctcgcctcttccagcccagcatccagctggcccgccagggcttccccgtgggcaagggcttggcggcagccctggaaaacaagcggaccgtcatcgagcagcagcctgtcttgtgtgaggtgttctgccgggatagaaaggtgcttcgggagggggagagactgaccctgccgcagctggctgacacctacgagacgctggccatcgagggtgcccaggccttctacaacggcagcctcacggcccagattgtgaaggacatccaggcggccgggggcattgtgacagctgaggacctgaacaactaccgtgctgagctgatcgagcacccgctgaacatcagcctgggagacgtggtgctgtacatgcccagtgcgccgctcagcgggcccgtgctggccctcatcctcaacatcctcaaagggtacaacttctcccgggagagcgtggagagccccgagcagaagggcctgacgtaccaccgcatcgtagaggctttccggtttgcctacgccaagaggaccctgcttggggaccccaagtttgtggatgtgactgaggtggtccgcaacatgacctccgagttcttcgctgcccagctccgggcccagatctctgacgacaccactcacccgatctcctactacaagcccgagttctacacgccggatgacgggggcactgctcacctgtctgtcgtcgcagaggacggcagtgctgtgtccgccaccagcaccatcaacctctactttggctccaaggtccgctccccggtcagcgggatcctgttcaataatgaaatggacgacttcagctctcccagcatcaccaacgagtttggggtacccccctcacctgccaatttcatccagccagggaagcagccgctctcgtccatgtgcccgacgatcatggtgggccaggacggccaggtccggatggtggtgggagctgctgggggcacacagatcaccacggccactgcactggccatcatctacaacctctggttcggctatgacgtgaagcgggccgtggaggagccccggctgcacaaccagcttctgcccaacgtcacgacagtggagagaaacattgaccaggcagtgactgcagccctggagacccggcaccatcacacccagatcgcgtccaccttcatcgctgtggtgcaagccatcgtccgcacggctggtggctgggcagctgcctcggactccaggaaaggcggggagcctgccggctactgagtgctccaggaggacaaggctgacaagcaatccagggacaagatactcaccaggaccaggaaggggactctgggggaccggcttcccctgtgagcagcagagcagcacaataaatgaggccactgtgccaggctccaggtggcctccctggcctgtctccccactcaaaaaaaaaaaaaaaaaa

SEQ ID NO: 284 - DNA, 2381 bp, Homo sapiens
gcctggattctcccagagattgcctggaacaccagctcgggtcctcgcacaccatcctgcgggtgcagcccagaactgtcttctgaggaagaggtgctctcctgggcccccactgtccccaggcctcagcaaggcaagtgaggtgctgccgtcatccaggctggacagttcagtgatttgcctgaggccccacagcagagttcaactggagacagagaaaccagctagaggcagagggaggtaacacggagtcccccagaaaggtctgggctgcgcgtgcttcaggtaacctcccttgaccttcaggagaacgagaaggctgcctgatcagagagtccctgaagaagattctgtggctacaggcttcagcagagtgtgagggagaccccggttatttcctcagctatttccaccaaatcctcctgtctttcgtggccaacaccccaggcaaggcttggggcccccgtctgctgctggacgcagagccatgaagaagaagttagtggtgctgggcctgctggccgtggtcctggtgctggtcattgtcggcctctgtctctggctgccctcagcctccaaggaacctgacaaccatgtgtacaccagggctgccgtggccgcggatgccaagcagtgctcgaagattgggagggatgcactgcgggacggtggctctgcggtggatgcagccattgcagccctgttgtgtgtggggctcatgaatgcccacagcatgggcatcgggggtggcctcttcctcaccatctacaacagcaccacacgaaaagctgaggtcatcaacgcccgcgaggtggcccccaggctggcctttgccaccatgttcaacagctcggagcagtcccagaagggggggctgtcggtggcggtgcctggggagatccgaggctatgagctggcacaccagcggcatgggcggctgccctgggctcgcctcttccagcccagcatccagctggcccgccagggcttccccgtgggcaagggcttggcggcagccctggaaaacaagcggaccgtcatcgagcagcagcctgtcttgtgtgaggtgttctgccgggatagaaaggtgcttcgggagggggagagactgaccctgccgcagctggctgacacctacgagacgctggccatcgagggtgcccaggccttctacaacggcagcctcacggcccagattgtgaaggacatccaggcggccgggggcattgtgacagctgaggacctgaacaactaccgtgctgagctgatcgagcacccgctgaacatcagcctgggagacgtggtgctgtacatgcccagtgcgccgctcagcgggcccgtgctggccctcatcctcaacatcctcaaagggtacaacttctcccgggagagcgtggagagccccgagcagaagggcctgacgtaccaccgcatcgtagaggctttccggtttgcctacgccaagaggaccctgcttggggaccccaagtttgtggatgtgactgaggtggtccgcaacatgacctccgagttcttcgctgcccagctccgggcccagatctctgacgacaccactcacccgatctcctactacaagcccgagttctacacgccggatgacgggggcactgctcacctgtctgtcgtcgcagaggacggcagtgctgtgtccgccaccagcaccatcaacctctactttggctccaaggtccgctccccggtcagcgggatcctgttcaataatgaaatggacgacttcagctctcccagcatcaccaacgagtttggggtacccccctcacctgccaatttcatccagccagggaagcagccgctctcgtccatgtgcccgacgatcatggtgggccaggacggccaggtccggatggtggtgggagctgctgggggcacacagatcaccacggccactgcactggccatcatctacaacctctggttcggctatgacgtgaagcgggccgtggaggagccccggctgcacaaccagcttctgcccaacgtcacgacagtggagagaaacattgaccaggcagtgactgcagccctggagacccggcaccatcacacccagatcgcgtccaccttcatcgctgtggtgcaagccatcgtccgcacggctggtggctgggcagctgcctcggactccaggaaaggcggggagcctgccggctactgagtgctccaggaggacaaggctgacaagcaatccagggacaagatactcaccaggaccaggaaggggactctgggggaccggcttcccctgtgagcagcagagcagcacaataaatgaggccactgtgccaggctccaggtggcctccctggcctgtctccccactcaaaaaaaaaaaaaaaaaa

SEQ ID NO: 285 - DNA, 2364 bp, Homo sapiens
tccgccggggctgctgggcacgccctggctggtctcttggactagcgggtgcagcccagaactgtcttctgaggaagaggtgctctcctgggcccccactgtccccaggcctcagcaaggcaagtgaggtgctgccgtcatccaggctggacagttcagtgatttgcctgaggccccacagcagagttcaactggagacagagaaaccagctagaggcagagggaggtaacacggagtcccccagaaaggtctgggctgcgcgtgcttcaggtaacctcccttgaccttcaggagaacgagaaggctgcctgatcagagagtccctgaagaagattctgtggctacaggcttcagcagagtgtgagggagaccccggttatttcctcagctatttccaccaaatcctcctgtctttcgtggccaacaccccaggcaaggcttggggcccccgtctgctgctggacgagccatgaagaagaagttagtggtgctgggcctgctggccgtggtcctggtgctggtcattgtcggcctctgtctctggctgccctcagcctccaaggaacctgacaaccatgtgtacaccagggctgccgtggccgcggatgccaagcagtgctcgaagattgggagggatgcactgcgggacggtggctctgcggtggatgcagccattgcagccctgttgtgtgtggggctcatgaatgcccacagcatgggcatcgggggtggcctcttcctcaccatctacaacagcaccacacgaaaagctgaggtcatcaacgcccgcgaggtggcccccaggctggcctttgccaccatgttcaacagctcggagcagtcccagaagggggggctgtcggtggcggtgcctggggagatccgaggctatgagctggcacaccagcggcatgggcggctgccctgggctcgcctcttccagcccagcatccagctggcccgccagggcttccccgtgggcaagggcttggcggcagccctggaaaacaagcggaccgtcatcgagcagcagcctgtcttgtgtgaggtgttctgccgggatagaaaggtgcttcgggagggggagagactgaccctgccgcagctggctgacacctacgagacgctggccatcgagggtgcccaggccttctacaacggcagcctcacggcccagattgtgaaggacatccaggcggccgggggcattgtgacagctgaggacctgaacaactaccgtgctgagctgatcgagcacccgctgaacatcagcctgggagacgtggtgctgtacatgcccagtgcgccgctcagcgggcccgtgctggccctcatcctcaacatcctcaaagggtacaacttctcccgggagagcgtggagagccccgagcagaagggcctgacgtaccaccgcatcgtagaggctttccggtttgcctacgccaagaggaccctgcttggggaccccaagtttgtggatgtgactgaggtggtccgcaacatgacctccgagttcttcgctgcccagctccgggcccagatctctgacgacaccactcacccgatctcctactacaagcccgagttctacacgccggatgacgggggcactgctcacctgtctgtcgtcgcagaggacggcagtgctgtgtccgccaccagcaccatcaacctctactttggctccaaggtccgctccccggtcagcgggatcctgttcaataatgaaatggacgacttcagctctcccagcatcaccaacgagtttggggtacccccctcacctgccaatttcatccagccagggaagcagccgctctcgtccatgtgcccgacgatcatggtgggccaggacggccaggtccggatggtggtgggagctgctgggggcacacagatcaccacggccactgcactggccatcatctacaacctctggttcggctatgacgtgaagcgggccgtggaggagccccggctgcacaaccagcttctgcccaacgtcacgacagtggagagaaacattgaccaggcagtgactgcagccctggagacccggcaccatcacacccagatcgcgtccaccttcatcgctgtggtgcaagccatcgtccgcacggctggtggctgggcagctgcctcggactccaggaaaggcggggagcctgccggctactgagtgctccaggaggacaaggctgacaagcaatccagggacaagatactcaccaggaccaggaaggggactctgggggaccggcttcccctgtgagcagcagagcagcacaataaatgaggccactgtgccaggctccaggtggcctccctggcctgtctccccactcaaaaaaaaaaaaaaaaaa

SEQ ID NO: 286 - DNA, 2093 bp, Homo sapiens
tcccttgaccttcaggagaacgagaaggctgcctgatcagagagtctctgaagaagattctgtggctacaggcttcagcagagtgtgagggagaccccggttatttcctcagctgtttccaccaaatcctcctgtctttcgtggccaacaccccaggcaaggcttggggcccccgtctgctgctggacgcagagccatgaagaagaagttagtggtgctgggcctgctggccgtggtcctggtgctggtcattgtcggcctctgtctctggctgccctcggcctccaaggaacctgacaaccatgtgtacaccagggctgccgtggccgcggatgccaagcagtgcttggagattgggagggacacactgcgggacggtggctctgcagtggatgcagccattgcagccctgttgtgtgtggggctcatgaatgcccacagcatgggcatcggggttggcctcttcctcaccatctacaacagcaccactcatgactgaggtcatcaatgcccgcgaggtggcccccaggctggcctttgccagcatgttcaacagctcggagcagtcccagaagggagggctgtcggtggcggtgcctggggagatccgaggctatgagctggcacaccagcggcatgggcggctgccctgggctcgcctcttccagcccagcatccagctggcccgccagggcttccccgtgggcaagggcttggcggcagtcctggaaaacaagcggaccgtcatcgagcagcagcctgtcttgtgtgaggtgttctgccgggatagaaaggtgcttcgggagggggagagactgaccctgccgcggctggctgacacctacgagatgctggccatcgagggtgcccaggccttctacaacggcagcctcatggcccagattgtgaaggacatccaggcggctgggggcattgtgacagctgaggacctgaacaactaccgtgctgagctgatcgagcacccgctgaacatcagcctgggagacgcggtgctgtacatgcccagtgcgcggctcagcgggcccgtgctggccctcatcctcaacatcctcaaagggtacaacttctcccgggagagcgtggagacccccgagcagaagggcctgacgtaccaccgcatcgtagaggctttccggtttgcctacgccaagaggaccctgcttggggaccccaagtttgtggatgtgactgaggtggtccgcaacatgacctctgagttcttcgctgcccagctccggtcccagatctctgaccacaccactcacccgatctcctactacaagcccgagttctacacgccggatgacgggggcactgctcacctgtctgtcgtcgcagaggacggcagtgctgtgtccgccaccagcaccatcaacctctactttggctccaaggtctgctccccggtcagtgggatcctgttcaataatgaatggacgacttcagctctcccagcattcaccaatgagtttggggcacccccctcacctgccaatttcatccagccagggaagcagccgctcttgtccatgtgcctgacgatcatggtgggccaggacggccaggtccggatggtggtgggagctgctgggggcacgcagatcaccacagacactgcactggccatcatctacaacctctggttcggctatgacgtgaagagggccgtggaggagccccggctgcacaacaagcttctgcccaacgtcacgacagtggagagaaacattgaccaggcagtgactgcagccctggagacccggcaccatcacacccagatcgcgtccaccttcatcgctgtggtgcaagccatcgtccgcacggctggtggctgggcagctgcctcggactccaggaaaggcggggaacctgctggctactgattgctccaggcagacaaggctgacaagcaatccagggacaagatactcaccaggatgaggaagaggactttgggggacgggcttcccctgtgagcagcagagcagcataataaatgaggccactgtgccaggctccaggtggcctccctggcctgtctccacaaaaaaaaaaaaaaaaaaaaaaaaaaa

SEQ ID NO: 287 - DNA, 872 bp, Homo sapiens
gccagctctggggtctcggcaggtggtccacaacatgacctctgagttcttcgctgcccagctccgggcccagatctctgacgacaccactcacccgatctcctactacaagcccgagttctacacgccggttgatgggggcactgctcacctgtctgtcgtcgcagaggacggcagtgctgtgtccgccaccagcaccatcaacctctactttggctccaaggtccgctccccggtcagcgagatcctgttcaatgatgaaatggatgacttcagctctcccaacatcaccaacgagtttggggtgcccccctcacctgccaatttcatccagccagggaagcagccgctctcgtcaatgtgcccgacgatcatggtgggccaggacggccaggtccggatggtggtgggagctgctgggggcacacagatcaccacagccactgcactggccatcatctacaacctctggttcggctatgacgtgaagcgggccgtggaggagccccggctgcacaaccagcttctgcccaacgtcacgacagtggagagaaacattgaccaggcagtgactgcagccctggagacccggcaccatcacacccagatcgcgtccaccttcatcgctgtggtgcaagccatcgtccgcacggctggtggctgggcagctgcctcggactccaggaaaggcggggagcctgccggctactgagtgctccaggaggacaaggctgacaagcaatccagggacaagatactcaccaggaccaggaaggggactctgggggactggcttcccctgtgagcagcagagcagcacaataaatgaggccactgtgccaggctccaggtggcctccctgccctgtcaaa

SEQ ID NO: 288 - DNA, 955 bp, Homo sapiens
aggccagctctggggtctcggcaggtggtccacaacatgacctctgagttcttcgctgcccagctccgggcccagatctctgacgacaccactcacccgatctcctactacaagcccgagttctacacgccggttgatgggggcactgctcacctgtctgtcgtcgcagaggacggcagtgctgtgtccgccaccagcaccatcaacctctactttggctccaaggtccgctccccggtcagcgagatcctgttcaatgatgaaatggatgacttcagctctcccaacatcaccaacgagtttggggtgcccccctcacctgccaatttcatccagccagggaagcagccgctctcgtcaatgtgcccgacgatcatggtgggccaggacggccaggtccggatggtggtgggagctgctgggggcacacagatcaccacagccactgcactgatatgtgtcaccccttttctccctggccgtgcccaccctgcacagcccccaagccatgctgatcacactcccatgccccaggccatcatctacaacctctggttcggctatgacgtgaagcgggccgtggaggagccccggctgcacaaccagcttctgcccaacgtcacgacagtggagagaaacattgaccaggcagtgactgcagccctggagacccggcaccatcacacccagatcgcgtccaccttcatcgctgtggtgcaagccatcgtccgcacggctggtggctgggcagctgcctcggactccaggaaaggcggggagcctgccggctactgagtgctccaggaggacaaggctgacaagcaatccagggacaagatactcaccaggaccaggaaggggactctgggggactggcttcccctgtgagcagcagagcagcacaataaatgaggccactgtgccaggctccaggtggcctccctgccctgtcaaa

SEQ ID NO: 289 - DNA, 1049 bp, Homo sapiens
ctcgagagctgggctctgcgtcctcgtccagccgccaactcggccaaaggcgaagccagcagtttcttctgctgccgggcaacgcgccttttaaacctgagggagtgggcgcgtgagcacttaatggcgccggtgacagagtgagcttaacggattaataagcgcagccaggccagctctggggtctcggcaggtggtccgcgacatgacctccgagttcttctctgcccagctccgggcccagatctctgacgacaccactcacccgatctcctactacaagcccgagttctacatgccggatgacgggggcactgctcacctgtctgtggtcgcagaggacggcagtgctgtgtccgccaccagcaccatcaacctctactttggctccaaggtgcgctccccagtcagcgggatcctgctcaataatgaaatggatgacttcagctctaccagcatcaccaacgagtttggggtacccccctcacctgccaatttcatccagccagggaagcagccgctctcgtccatgtgcccgacgatcatggtgggccaggacggccaggtccggatggtggtgggagctgccgggggcacgcagatcaccatggccactgcactggccatcatctacaacctctggttcggctatgacgtgaagtgggccgtggaggagccccggctgcacaaccagcttctgcccaacgtcacgacagtggagagaaacattgaccaggaagtgactgcagccctggagacccggcaccatcacacccagatcacgtccaccttcattgctgtggtgcaagccatcgtccgcatggctggtggctgggcagctgcctcggactccaggaaaggtggggaacctgctggctactgattgctccaggcggacaaggctgacaagcaatccaggaacaaaatactcaccaggacgaggaagaggactttgggggacaggcttctcctgtgagcagcagagcagcacaataaatgaggccactgtgccaggctccaggtggcctccctggcctgtctccccactc

SEQ ID NO: 290 - DNA, 977 bp, Homo sapiens
attgaatgcagcaagggtctggaggctgaggaccaggcagacaaacattcagagttgctggaatgcgacagagacagggagtcagactggtcatgcaaggccagctctggggtctcggcaggtggtccgcgacatgacctccgagttcttctctgcccagctccgggcccagatctctgacgacaccactcacccgatctcctactacaagcccgagttctacatgccggatgacgggggcactgctcacctgtctgtggtcgcagaggacggcagtgctgtgtccgccaccagcaccatcaacctctactttggctccaaggtgcgctccccagtcagcgggatcctgctcaataatgaaatggatgacttcagctctaccagcatcaccaacgagtttggggtacccccctcacctgccaatttcatccagccagggaagcagccgctctcgtccatgtgcccgacgatcatggtgggccaggacggccaggtccggatggtggtgggagctgccgggggcacgcagatcaccatggccactgcactggccatcatctacaacctctggttcggctatgacgtgaagtgggccgtggaggagccccggctgcacaaccagcttctgcccaacgtcacgacagtggagagaaacattgaccaggaagtgactgcagccctggagacccggcaccatcacacccagatcacgtccaccttcattgctgtggtgcaagccatcgtccgcatggctggtggctgggcagctgcctcggactccaggaaaggtggggaacctgctggctactgattgctccaggcggacaaggctgacaagcaatccaggaacaaaatactcaccaggacgaggaagaggactttgggggacaggcttctcctgtgagcagcagagcagcacaataaatgaggccactgtgccaggctccaggtggcctccctggcctgtctccccactc

SEQ ID NO: 291 - DNA, 1108 bp, Homo sapiens
attgaatgcagcaagggtctggaggctgaggaccaggcagacaaacattcagagttgctggaatgcgacagagacagggagtcagactggtcatgcaaggtcctgggcctgcccttgggtcctggggagccacggaaggttgtgggtgccagagggttgtggtcagagccacagtcaggggccttctgagacctgtgccccctccccaccctccctccccacctccctaggccagctctggggtctcggcaggtggtccgcgacatgacctccgagttcttctctgcccagctccgggcccagatctctgacgacaccactcacccgatctcctactacaagcccgagttctacatgccggatgacgggggcactgctcacctgtctgtggtcgcagaggacggcagtgctgtgtccgccaccagcaccatcaacctctactttggctccaaggtgcgctccccagtcagcgggatcctgctcaataatgaaatggatgacttcagctctaccagcatcaccaacgagtttggggtacccccctcacctgccaatttcatccagccagggaagcagccgctctcgtccatgtgcccgacgatcatggtgggccaggacggccaggtccggatggtggtgggagctgccgggggcacgcagatcaccatggccactgcactggccatcatctacaacctctggttcggctatgacgtgaagtgggccgtggaggagccccggctgcacaaccagcttctgcccaacgtcacgacagtggagagaaacattgaccaggaagtgactgcagccctggagacccggcaccatcacacccagatcacgtccaccttcattgctgtggtgcaagccatcgtccgcatggctggtggctgggcagctgcctcggactccaggaaaggtggggaacctgctggctactgattgctccaggcggacaaggctgacaagcaatccaggaacaaaatactcaccaggacgaggaagaggactttgggggacaggcttctcctgtgagcagcagagcagcacaataaatgaggccactgtgccaggctccaggtggcctccctggcctgtctccccactc

SEQ ID NO: 292 - DNA, 4762 bp, Homo sapiens
aattagttgccattcggagtgaggagtgggtagaagcggcggcggcggcggcggcgtttgcggtggcgcggactccgaggagcgccagcacctcgaggccctttctctctaccctggtccccagaagcaggggtcccggccctccttgcagctgccgggttctcccgtgcgtgcagccctgcgagggctgaggagaaggctgcgagcggccctcggggctgcgtgatccgggccgttgccctgtcagcacgatgcctggagcggtggcggcggcggctccgggctccttgcggccccggccgtgaccgccacaccgagcccagccgggcggttgcggccgttggacgtttgttttcgcagccttcccctcccccctcgccgaggcggcgggggtgtgcgttggggagggggagccccgagactcctcccccacagcgatacccccgcccctcccccttacacactcgcacgcactatcgcgccggctcccacacgctcgcgcgcctcccgccccgcgcctccgtgtcggccggcggcgtccagggcccgcagagccaccatgtccactgcctcctcctcctcctcctccagttcctctcagacccctcatcccccgtcgcagaggatgaggcgcagcgccgcggggtccccgcccgccgtcgccgccgccgggagcgggaacggtgcgggcggcggcggcggcgtgggctgcgccccggctgcgggagccggccggctgctgcagcccatccgcgccacggtgccctaccagctcttgcggggcagccagcacagtcccacgcgtccgcccgtcgccgctgccgccgcctcgctgggcagcctcccggggcccggcgcggcccgcggccccagcccgtccagcccgacgccgccggcggccgcagccccggccgagcaggcgccgcgggccaagggccgcccgagacggtccccagagagccaccggaggagcagctcacctgagagacggagccccggctcgcccgtgtgcagagcggacaaggcaaaatctcagcaagttcggacctctagtacaataaggcgaacctcctctttggatacaataacaggaccttacctcacaggacagtggccacgggatcctcatgttcactacccttcatgcatgaaagacaaagctactcagacacctagctgttgggcagaagagggtgcagaaaagaggtcacatcagcgttctgcgtcatgggggagtgctgatcaactaaaagagcagatcgccaaactgaggcagcaactacaacgcagtaaacagagtagtcgtcacagtaaggagaaagatcgccagtcacctcttcatggcaaccatataacaatcagtcacactcaggctactggatcaaggtcagttcctatgccactgtcaaatatatcagtgccaaaatcatctgtttcgcgtgtgccctgcaatgtagaaggaataagtcctgaattagaaaaggtattcattaaagaaaataatgggaaggaagaagtatccaagccgttggacataccagatggtcgaagagctccacttcctgctcattaccggagcagtagtactcgcagcattgacactcagactccttctgtccaggagcgcagcagtagctgcagcagtcattcaccctgtgtctcccctttttgtcccccggaatcccaggatggtagcccttgctcaacagaagatttgctctatgatcgtgataaagacagtgggagtagctcaccgttacccaagtatgcttcatctcccaaaccaaacaacagctacatgttcaaacgggagcccccagagggatgtgagcgagtgaaggtctttgaggaaatggcgtctcgtcagcctatctcggcccctctcttttcatgtcctgacaaaaacaaggttaatttcatcccaaccggatcagctttctgtcctgtaaaacttctaggccccctcttacctgcttctgaccttatgctcaagaactcccctaactctggccagagctcagctttggcaactctgaccgttgagcagctctcatcccgggtttcctttacgtctctttctgatgacaccagcacagcgggctccatggaggcctctgtccagcagccatcccagcagcagcagctcctgcaggaactgcagggtgaggaccacatctctgctcagaactatgtgatcatctaaaaaagggggagctggcctccaccctatgttccatggattcggaacaagatttcagacatctgcatgagtgacaaactttctgaacaccaccaccaccaataatacttatcagcatcataaagtatctcttaaacactgatcttggcagggacggaactcctattcagcagtttttgtggaaagcagtaatgcttgcaaaacgtgtgtgtcattcagcattttaagtggagactatgcatttcatagtatatttgacagattagtactgtgtcctgtgttttgttccagattcttcagtataaataagctctatatcaaaaagttgcctgtctaaatagaaaatgtcttgctgtgttttgtcctatggaaaatactgtaattcaggattatgtttacaattgatccaggtgtttgtttctaacttctgtaatacatacaatgcaaaaaaaaaaaaaaaaaaatggccacaacagttgcacagtgcccaccctatggcctagcttcaggtacttcagttgaagtctaaactcaggtaacttggaatgtatatcatattgggatattaaatatttcacagctaaaaagctaaagagggaacatcactcttttgcctttccttattttatgcatttccctttcctcattacattccacattcttagaataagaagtgcattcaatcctaggagaatgataatcctggacatgggtgaacatgaggagaaccagcaaaatctgtggtgtttgacatcactttgtcatgtggttacaagtaaaacaactgttgcattcactgtttcaacatgtgtacatgtggcttttttaaaagttcaggtgttgctcagtaaaggactgtgacaatgttgcaaataaagtgttcagtactggactgtacataaacattccacattgtgtgtgatgaaatttaaagacaagaatgtctagagttaatttcaaaataagtgaagtgtttgacggaatggttgagatttttttgtttatgttagccatcagggtcataactgttaccattttatctaaagacatatttatatttagtttctcccttggaaattctttattttgcaggtgaaaaagtgacatactttttgttattgtcttcctcaagcagtttaggtgcatgatcttcatttacatagaatacttgggtctcagaattgatgcaacataagcaggtttttttggtgacttacaagagcaatagtttgaagctatctcatttaagcctctcataatgcataatcatgagtagttttgaaatttgcaacctgtgaggtagagcataaactcaagaaaatagccttgaacttgcagacttttgacacaagttctccacaaagtgtgaagagagccccaggcattcctgattggtcaatgggagagcctaactttcattgttttcttcagtacaaagagtatccaaaagctaagtttttgtattccactactttcagttcaataaaacctagagttgtttcatctgcgcctaaagtgtatggcacaattttcttaagaattaggggaaccaggtgcctacagttaaaggaacgtttcagttcctttcattcattcctgggtttttcttttattttctaagaaggttgaagaaggatgagtgatagagaagaaagcaacaccattgatttttttttttaagaaatgatatatatatgtatatgtttgtgtgtgtgtgtgtgtgtgtgtgtgtgtgtattctgtgcattattttgtcatgatctcaattctcttctttccaccaaagtttgtcgtaatattttctcctgaaggtgcattctggctcctttaaattagtcagtgttatattgtaggagactgtcatggaaaaaaggactcagtttactttcgtcattttcacaggggaaccttttaaaacaatcttttcagcagcagatacctttaaccctaataatctcaggccttgatgaaaatactatattttgtagattatggttaaagggggaaaattactagttccgtaagataaatatgagctccatttgacttctgatgtctggtttagcattacataatatgttgatcttacactctgcttttgtccaaataaaatgcaatagtatcaatatcaatttcagaaaaatggactgaatatgcttttttggtgatgaaatctcatgtacgatatttatagtgatgtgcttttattttctcatgagatactaaatattaattgtgttgtacatttgttcttagcatatattaaagttttgaaccaaatgtgttaaagcttacgctttgccatgtaaatttcccagaagttgttgagctcaaatgtatcctacatccagctgtagaaatttgtcagaaattgtttaaattttgtatataattgtactgtttaattctagccattgcgctgaacagtatttgagttaccatataatatggctttacacaaggaaatgtgtggcttttgttttgtattttttcagtatagaagttcctgtgtcttatttaaataaagttattagtaaaactgaaaaaaaaaaaaaaaaaaaa

SEQ ID NO: 293 - DNA, 4348 bp, Homo sapiens
agtgcggagccttaggcggagcgaagagaaccggtcgcggcaatcctagcgcgcagcagcagcagcagcagcagcagcagcagcagcagcagcagcagcacccgcatccgctgcgggagtccgagccggaaccacacccaagtagctgccctttcctcttctgtcatctcaccgccccaccacagaccgcgttccccgaggaaaccggccgcccacgcccggagcatcctcccctgttgagcgggcgctgacggacccggcggcatgatgcggctgcgaggctcggggatgctgcgggacctgctcctgcggtcgcccgccggcgtgagcgcgactctgcggcgggcacagcccttggtcaccctgtgccggcgtccccgaggcgggggacggccggccgcgggcccggctgccgccgcgcgactccacccgtggtggggcgggggcggctggccggcggagcccctcgcgcggggcctgtccagctctccttcggagatcttgcaggagctgggcaaggggagcacgcatccgcagcccggggtgtcgccacccgctgccccggcggcgcccggccccaaggacggccccggggagacggacgcgtttggcaacagcgagggcaaagagctggtggcctcaggtgaaaataaaataaaacagggtctgttacctagcttggaagatttgctgttctatacaattgctgaaggacaagagaaaatacctgttcataaatttattacagcactcaaatctacaggattgcgaacgtctgatcccaggttgaaagagtgtatggatatgttaagattaactcttcaaacaacatcagatggtgtcatgctagacaaagatctttttaaaaaatgtgttcagagcaacattgttttgttgacacaagcatttagaagaaagtttgtgattcctgactttatgtcttttacctcacacattgatgagttatatgaaagtgctaaaaagcagtctggaggaaaggttgcagattatattcctcaactggccaaattcagtcccgatttgtggggtgtgtctgtttgtacagtagatggacagaggcattctactggagataccaaagttcccttctgtcttcagtcctgtgtaaaacctttgaaatatgccattgctgttaatgatcttggaactgaatatgtgcatcgatatgttggaaaagagccgagtggactaagattcaacaaactatttttgaatgaagatgataaaccacataatcctatggtaaatgctggagcaattgttgtgacttcactaataaagcaaggagtaaataatgctgaaaaatttgactatgtcatgcagtttttgaataagatggctggtaatgaatatgttggattcagtaatgcaacgtttcagtctgaaagagaaagtggagatcgaaattttgcaataggatattacttaaaagaaaagaagtgttttccagaaggcacagacatggttggtatattagacttctacttccagctgtgctccattgaagtgacttgtgaatcagccagtgtgatggctgcgacactggctaatggtggtttctgcccaattactggtgaaagagtactgagccctgaagcagttcgaaatacattgagtttgatgcattcctgtggcatgtatgacttctcagggcagtttgctttccatgttggtcttcctgcaaaatctggagttgctgggggcattcttttagttgtccccaatgttatgggtatgatgtgctggtctcctcctctggataagatgggcaacagtgttaagggaattcacttttgtcacgatcttgtttctctgtgtaatttccataactatgataatttgagacactttgcaaaaaaacttgatcctcgaagagaaggtggtgatcaaagggtaaagtcagtgataaatcttttgtttgctgcatatactggagatgtgtctgcacttcgaagatttgctttgtcagctatggacatggaacagcgggactatgattctagaacagcactccatgtagctgctgcagagggtcatgttgaagttgttaaatttttgctggaagcctgcaaagtaaaccctttccccaaggacaggtggaataacactcccatggatgaagcactgcactttggacaccatgatgtatttaaaattctccaagaataccaagtccagtacacacctcaaggagattctgacaacgggaaggaaaatcaaaccgtccataagaatcttgatggattgttgtaatggtctcaaatcccaagatttaaatcacttacctatttaattgtggaaaatgattatgaagaacatgtgtatttctatctggtagtgatgtatattttacatttgtcatttcagtgttactggagttttcttcattgtgcacacaggacaaatctgatctctttgggaaaaaatagaaataaaacaatctccctccataatgtgagcaatattacctcgtgcattgtataatttgatgtaaaagaaatagttaccaatgctagcttgtgtggtcttccatgatttatttgtgttttgtgaattttcaatttatggtgatgatctgctgatatgcatttataaagtaagctctgttgtacagtctgtccaaatgggtcaaggttgcctttagaagcaaatagtgtgattttcaagacttcaaatacaaatttagtttaagtgtttgaacaactatatgcacttacggttgtgtgtttaaaatgtctctctcaccccctagcttcatgatgtgactcttaaaaaactataatagttaacaactgttagtaagatagaccaattctgattagactttatcagggaatctgtttaagatatgtttggtgaccaaaacgtatgtgtgaatgtagttataatgcttttgaaaaattttcctttttctatatccccttagtccagcctctcttctcagacatttagctatctgcctctttcctttagctgggaaagtgagagctggcatactatgcagtttttatgttttccatagtaagtcagaaaatgcctcctatttctggcatcagaactttgccatttgtctacagaagacgaaccagagacaaaattactaagtataaattagtcaagtttatcagtctaaaaaacgaagggatgtgcaactgcagctctttaagaagttttttttttttagcttctagggtaaagataaattcagaaatgctctaagctaccaaagttattctgaaagtatgggaactgctacaactaacaaacatttgtttccaagcctgtcattaagagtctgcatcaagagatttgtcctccttgggggaccactggatcattccagatttcttgtgatttttctattgtgtaattcttggtgggctctgtagtttaataataagaaaaaggccatttcattttaaattgtgacctataattctttgtcttgggttggtaattcaggattcatttggaaagtgggtaaaaggggcttcaaaaaacggatagaacaggattttctaggagttacacatacattttatcctgtcatacctcgagataaagtggcatgttagtgaggagttctgatattaagcacacacacacatgcacacaaatggacttctctgaagctgtgtttagtgaaatgagctcaagtacatgaatgttagttgttatcacatacagcaaattcctttttttttctttttctatgagcacactctgctgcttctaaactttacatgcctgatggcaccttactccagcagcctccaggtgctttcattttcacttccagtctaagccagtggctcctgccactgccctcccattacctagatggcacctcctttggtgaaaccacggccaatgttccttagctgcaccaggcccgaagctgttcccatgcttgagcttccatggggaggatgctgagtgagcagtttcctaccccgtggatctagcaagccatggagacaggtagcatttgtaagatgctgcacaggagcagcattatccccaaagatattacagggtagacacgttttaactgaaatcaatcaagataactttattcaaagagcagcccgctttgtgtgactaaaatgaaacaagacagttgaattgtgtgacttgaagattaccaatgattttgaggcttttctataataaaaagaggttctaaccattatttgggaacaaagagagttttcatcttttttcagatcaaaaccattctgtaaaatctttgttgtttaattaaatgtgccgttatttacccctgatgttatttatgactatgtgccgattcctgctaaaaaaaaaa

SEQ ID NO: 294 - DNA, 1953 bp, Homo sapiens
ctgcggtcactgctgaggttttcagaactttccaggcaaaggccagccaggtcctttgcctccaacccactccgcgcctacctcccgcctggggacacccctaggcccaggagatcctactctcccccgagcaccgacgttccaactcgtctgcgcccccgactgctgtccggctcctgtgccaaggggcgcgcgcatcttcccggggccagcaacgctcccaacttctcgactcgccctcctcctccccagagcgagagtggggcgggctgagcccggatccggggtgcactcgagcgttcccagcgctcggcattcaccccgcctcagagccgactttcgaagggggattgagcctcggaggtccaggcgtcttactccaaagctcaagtcggcccccgtcttttctttccacacccctgtgcccgtcgcatgctggccgggtgagcggccgggccgaggattcgggtgcccggggccgcgtcgccccgtcgggtactgagctgagcgcaccatggccggctgctgctgcctgtccgcggaggagaaggagtcgcagcgcatcagcgcggagatcgagcgacagcttcgtcgggacaagaaggacgcgcgccgtgagcttaagctgctgctgctgggaactggtgaaagtgggaaaagcacctttatcaagcagatgagaattatccatgggtctggttacagcgacgaagacagaaaggggttcacgaagctggtttaccaaaacatattcaccgccatgcaagccatgatcagagcgatggacacgctaaggatacagtatgtgtgtgaacagaataaggaaaatgcccagataatcagagaagtggaagtggacaaggtctccatgctctccagggagcaggtggaggccatcaagcagctctggcaagatccaggcatccaggagtgttacgacaggaggagggagtaccagctgtcggactctgccaaatattacctgactgacattgaccgcatcgccacaccatcattcgtgcctacccaacaagatgtgcttcgcgtccgagtgcccaccaccggcatcattgagtatccatttgacttggaaaacatcatctttcggatggtggatgttggtggccaacgatcggaaagacggaagtggattcactgctttgagagtgtcacctccattattttcttggttgctctgagtgaatatgaccaggtcctggctgagtgtgacaacgagaatcgcatggaagagagcaaagccttatttaaaaccatcatcacctacccctggtttctgaattcgtctgtgattttattcttgaacaagaaggatcttttggaagagaaaatcatgtactctcatctaattagctatttcccagaatacacaggaccgaaacaggatgtcagagctgccagagactttatcctgaagctttaccaagatcagaatcctgacaaagagaaagtcatctactctcacttcacatgtgctacagatacagacaatattcgctttgtgtttgctgctgtcaaagacacaattctacagctaaacctaagggaattcaaccttgtctaaaagctgctgcccactcctcccctataacagaagatgtgatttgcaaactccttgttttatttgcaagtgcttctgacatcaccagagccagccccatgccaggaactaaggatgtcatgtagatcgtggggacagagatgggtgatggaacttggaagatatttgagtttaccaacatactttaaaagtccttacatcccaaattgtgtttataattattttcttgacttttggctataagattttgtgtaatttttgaatttggtgttttctagaatttttaaaagccactttgatttagttttaaatatgtttaaaaatagcgattaaaattatgtaagcaaggaaaaaaaaaaaaaaaaaaaaaaaaa

SEQ ID NO: 295 - DNA, 2132 bp, Homo sapiens
ggggagccctggcctccccacctcctcccgtccccaccctgttcccagcactcaagccttgccaccgccgagccgggcttcctgggtgtttcaggcaaggaagtctaggtccctggggggtgacccccaaggaaaaggcagcctccctgcgcacccggttgcccggagccctctccagggccggctgggctgggggttgccctggccagcaggggcccgggggcgatgccacccggtgccgactgaggccaccgcaccatggcccgctcgctgacctggcgctgctgcccctggtgcctgacggaggatgagaaggccgccgcccgggtggaccaggagatcaacaggatcctcttggagcagaagaagcaggaccgcggggagctgaagctgctgcttttgggcccaggcgagagcgggaagagcaccttcatcaagcagatgcggatcatccacggcgccggctactcggaggaggagcgcaagggcttccggcccctggtctaccagaacatcttcgtgtccatgcgggccatgatcgaggccatggagcggctgcagattccattcagcaggcccgagagcaagcaccacgctagcctggtcatgagccaggacccctataaagtgaccacgtttgagaagcgctacgctgcggccatgcagtggctgtggagggatgccggcatccgggcctactatgagcgtcggcgggaattccacctgctcgattcagccgtgtactacctgtcccacctggagcgcatcaccgaggagggctacgtccccacagctcaggacgtgctccgcagccgcatgcccaccactggcatcaacgagtactgcttctccgtgcagaaaaccaacctgcggatcgtggacgtcgggggccagaagtcagagcgtaagaaatggatccattgtttcgagaacgtgatcgccctcatctacctggcctcactgagtgaatacgaccagtgcctggaggagaacaaccaggagaaccgcatgaaggagagcctcgcattgtttgggactatcctggaactaccctggttcaaaagcacatccgtcatcctctttctcaacaaaaccgacatcctggaggagaaaatccccacctcccacctggctacctatttccccagtttccagggccctaagcaggatgctgaggcagccaagaggttcatcctggacatgtacacgaggatgtacaccgggtgcgtggacggccccgagggcagcaagaagggcgcacgatcccgacgcctcttcagccactacacatgtgccacagacacacagaacatccgcaaggtcttcaaggacgtgcgggactcggtgctcgcccgctacctggacgagatcaacctgctgtgacccaggccccacctggggcaggcggcaccggcgggcgggtgggaggtgggagtggctgcagggacccctagtgtccctggtctatctctccagcctcggcccacacgcaagggagtcgggggacggacggcccgctgctggccgctctcttctctgcctctcaccaggacagccgccccccagggtactcctgcccttgcttgactcagtttccctcctttgaaagggaaggagcaaaacggccatttgggatgccagggtggatgaaaaggtgaagaaatcaggggattgaggacttgggtgggtgggcatctctcaggagccccatctccgggcgtgtcacctcctgggcagggttctgggaccctctgtgggtgacgcacaccctgggatggggctagtagagccttcaggcgccttcgggcgtggactctggcgcactctagtggacaggagaaggaacgccttccaggaacctgtggactaggggtgcagggacttccctttgcaaggggtaacagaccgctggaaaacactgtcactttcagagctcggtggctcacagcgtgtcctgccccggtttgcggacgagagaaatcgcggcccacaagcatccccccatcccttgcaggctgggggctgggcatgctgcatcttaaccttttgtatttattccctcaccttctgcagggctccgtgcgggctgaaattaaagatttcttagaggctgcgtcgccagcgtcctgttt

SEQ ID NO: 296 - DNA, 2279 bp, Homo sapiens
gcattctagtgcgaccttgtttacacctcccctggctcagtcacacagctgtgtggtaggctactagaagtgtttagtagttgtcactgggatcatgctgatgtggccccatccccgcctctccctgccctgtgatatcggaggaaacctgacagagcaaattggccatggccaagaaaaaggaaaagaaagagtgccaccaaaagcagggagccctaagggagcagttacaggtcctctttggattccagcacgacgcatcaaaccataccatgacgtgactaggacccaacctagaaatgaaggaactgaccctacaggactcacaaccctggataatgcagtgtcctcggacggcaacaagctctggacattacctgggggatgctgaaggcggcaactgaggaggctgaatgaatcctgctccagacacagacaccattcactccagataatttgttgcttgctatgctctctgttgtacattgcaactcgcatagggatgcaaagccggaataagagcaatgaccaccatgcctgacagacctgttgctgcgcacacctgtactctccaatgaacaagactgaatgcaaaaaaaacagaaaatggggagatttaggggatcagtcagtgtggttggaaaattgtaagatgaagttacaggatatagacacaaaccttcttggaaggccagaaggtttgcatagcttcagtaaaggatttggctgaaatcctttttacctctaatcccctttaccttgagttgatagcaatagagcaaataacatgggaatgtgggggagtttatctgaatagcttgtttactcatgtggtcctaagaccaacctttgattatccgcaggtgcatgattgctctctacctgggggcagggggagttaattacccacaggtggagctgaagagccaggaggctcagagtctgcagcagcagcaggaccagtacctgggtcatctgcagcagtatgtggccacctatcagcagcaggtggtcacctatcagcagctgacctctgaggaggaggagctgcacaaccagttactgctgcagacccagctcgtggaccggctgcagcagcagaaagctcaaagcaaagctgtggccaagatgggctgccaagagttgcgggagacccaggagcacctggaagctatcagccagcagaaccagcagcctcaggcccagttgagcctcatggctctccctggggaaggagatggacagtgaggaggaggaggaggtgcctcagcccatgccaagcatcccggaggatctagagagccagaaggccatggtggcatttttcaactcagctgtagctagtgccgaggaggagcaggcacggctatgtgggcagctgaaggagtgcactgccagcgcctggctcatctgttggcctcggcccagaaggaacctgaggcagcagccccagccccaagaactgggggtgatcccatgtgtggggagacccaccaggccctgcagggggccatggagaagctgtgggagagtacatcgcactgtaccagagccagagggcagtgcggaaggaggaggagtgcatcagcaggctggcccaggacaagggagaggtgaaggtgaagctgctggagctggcgtggcttgtggacgactgcaacaagtggcatagcagattcctggcagctgcccagaaccctgctgatgagcccactccaggggcccccgccccccagtagcttggggctactgacaagccagggtagtgagtagagtcctcaggcacagtgggcacgcaggagcaggggagggctcccacagcaccctgcctccctctctccaaagatctttgtgaggtgagccttgccagcagtggggagtctgcacaaggagaggcggggaagcattctccctgtgacaaccccactgagcagcagatcatgcaactgcttcatgagatgcagaacctccaggagcacccaggcttgggcagcagcccttgcattccttttttgtaccagactgatgagaacaatgaggtgaagatcaccatcatctaaaagccggccactgtcagcaaaacctggggaagtggggctggaggctctgcccctaccatgtccctaccaccccttcccagtcaaccctttaccctcacagtagcaagcataagacccctgtctaatgtggggagacaggtggagatgaggtgaagatcaccataatctaaaaggccactaaataaaaaaataaaaaattttaaaaaaaaaaaaaaaaaa

SEQ ID NO: 297 - DNA, 883 bp, Homo sapiens
agtagaagcacctgcgtggtgtgcgggggtggagcgggggctggagggagagttaatgatttgccacaggctcatttcgcaacttaaccaagggtcagcttcccgtgaccatgtaccagctgcgtcctctgggccacgctccacttgcccgcttccacccggaaagccccccaggctgagtgcggcatgatctccatcaccgaatggcagaagattggtgtggggatcaccggtttcggcatcttcttcatcctctttggaacactcctgtactttgattccgtgctcctggcctttggaaacctgctgttcctgacgggcctgtccctcatcattggcctgaggaagaccttttggttcttcttccaacggcacaaactcaagggaaccagcttcctcctggggggtgtggttatcgtgctcctacgctggcccctcctcggcatgttcctggaaacctacggattcttcagcctctttaagggctttttccctgtcgccttcggcttcctgggcaatgtctgcaacatccccttcctgggtgcgctgttccggagacttcaaggcactagctcgatggtctgaaaaacagagatgagctccttgaacttggatcattggttgagggggctagagggagaatgggaaccaccccctcagtcccctgcactgactcactccccgacatatccggacctccccaagtccagaaggaaggaatggagctgagcaactgacgtcaaatccccaagtcgactcaagaggctgccaggaagcagagatgcagaccccaaggagactgggctggggctggtatcacaccctcactctatatttatgggaggaaaagtgaagattaaattcccaagttgtgcgtgtgtct

SEQ ID NO: 298 - DNA, 2152 bp, Homo sapiens
ttcgtagtttcctgataaccattcagtcatctatttcaacaccctgacatgacataaaggcaggcacggaaccacacgttcaccatacagacacacgccactttgctggagcattcactaggcgaggcgctccatcggactcactagctgcactcatgaatcggcaccatctgcaggatcactttctggaaatagacaagaagaactgctgtgtgttccgagatgacttcattgccaaggtgttgccgccggtgttggggctggagtttatctttgggcttctgggcaatggccttgccctgtggattttctgtttccacctcaagtcctggaaatccagccggattttcctgttcaacctggcagtagctgactttctactgatcatctgcctgccgttcgtgatggactactatgtgcggcgttcagactggaagtttggggacatcccttgccggctggtgctcttcatgtttgccatgaaccgccagggcagcatcatattcctcacggtggtggcggtagacaggtatttccgggtggtccatccccaccacgccctgaacaagatctccaattggacagcagccatcatctcttgccttctgtggggcatcactgttggcctaacagtccacctcctgaagaagaagttgctgatccagaatggcactgcaaatgtgtgcatcagcttcagcatctgccataccttccggtggcacgaagctatgttcctcctggagttcttcctgcccctgggcatcatcctgttctgctcagccagaattatctggagcctgcggcagagacaaatggaccggcatgccaagatcaagagagccatcaccttcatcatggtggtggccatcgtctttgtcatctgcttccttcccagcgtggttgtgcggatccacatcttctggctcctgcacacttcgggcacgcagaattgtgaagtgtaccgctcggtggacctggcgttctttatcactctcagcttcacctacatgaacagcatgctggaccccgtggtgtactacttctccagcccatcctttcccaacttcttctccactttgatcaaccgctgcctccagaggaagataacaggtgagccagataataaccgcagcacgagcgtcgagctcacaggggaccccaacaaaaccagaggcgctccagaggcgttaatcgccaactccggtgagccatggagcccctcttatctgggcccaacctcaaataaccattccaagaagggacattgtcaccaagaaccagcatctctggagaaacagttgggctgttgcatcgagtaatgtcactggactcggcctaagatttcctggaacttccagattcagagaatctgatttagggaaactgtggcagatgagtgggagactggttgcaaggtgtgaccgcaggaatcctggaggaacagagagtaaagcttctaggcatctgaaacttgcttcatctctgacgctcgcaggactgaagatgggcaaattgtaggcgtttctgctgagcagagttggagccagagatctacttgtgacttgttggccttcttcccacatctgcctcagactggagggggctcagctcctggggtgatatctagcctgcttgtgagctctagcagggataaggagagctgagattggagggaattgtgttgttcctggaggaagcccaggcatcattaaacaagccagtaggtcacctggcttccgtggaccaattcatctttcagacaatctttagcagaaatggactcagggaagagactcacatgctttggttagtatctgtgtttccggtgggtgtaataggggattagccccagaagggactgagctaaacagtgttattatgggaaaggaaatggcattgctgctttcaaccagcgactaatgcaatccattcctctcttgtttatagtaatctaagggttgaacagttaaaacggcttcaggatagaaagctgtttcccacctgtttgcttttaccattaaaagggaaacgtgcctctgccccacgggtagaggggtgcacgttcctcctggttccttcgcttgtgtttctgtacttaccaaaaatctaccatttcaataaattttgataggagacaaaaaaaaaaaaaaaa

SEQ ID NO: 299 - DNA, 5680 bp, Homo sapiens
gggcgatgggttgatgggcgccgggggacgcaggatgcggggggcgcccgcgcgcctgctgctgccgctgctgccgtggctcctgctgctcctggcgcccgaggctcggggcgcgcccggctgcccgctatccatccgcagctgcaagtgctcgggggagcggcccaaggggctgagcggcggcgtccctggcccggctcggcggagggtggtgtgcagcggcggggacctcccggagcctcccgagcccggccttctgcctaacggcaccgttaccctgctcttgagcaataacaagatcacggggctccgcaatggctccttcctgggactgtcactgctggagaagctggacctgaggaacaacatcatcagcacagtgcagccgggcgccttcctgggcctgggggagctgaagcgtttagatctctccaacaaccggattggctgtctcacctccgagaccttccagggcctccccaggcttctccgactaaacatatctggaaacatcttctccagtctgcaacctggggtctttgatgagctgccagcccttaaggttgtggacttgggcaccgagttcctgacctgtgactgccacctgcgctggctgctgccctgggcccagaatcgctccctgcagctgtcggaacacacgctctgtgcttaccccagtgccctgcatgctcaggccctgggcagcctccaggaggcccagctctgctgcgagggggccctggagctgcacacacaccacctcatcccgtccctacgccaagtggtgttccagggggatcggctgcccttccagtgctctgccagctacctgggcaacgacacccgcatccgctggtaccacaaccgagcccctgtggagggtgatgagcaggcgggcatcctcctggccgagagcctcatccacgactgcaccttcatcaccagtgagctgacgctgtctcacatcggcgtgtgggcctcaggcgagtgggagtgcaccgtgtccatggcccaaggcaacgccagcaagaaggtggagatcgtggtgctggagacctctgcctcctactgccccgccgagcgtgttgccaacaaccgcggggacttcaggtggccccgaactctggctggcatcacagcctaccagtcctgcctgcagtatcccttcacctcagtgcccctgggcgggggtgccccgggcacccgagcctcccgccggtgtgaccgtgccggccgctgggagccaggggactactcccactgtctctacaccaacgacatcaccagggtgctgtacaccttcgtgctgatgcccatcaatgcctccaatgcgctgaccctggctcaccagctgcgcgtgtacacagccgaggccgctagcttttcagacatgatggatgtagtctatgtggctcagatgatccagaaatttttgggttatgtcgaccagatcaaagagctggtagaggtgatggtggacatggccagcaacctgatgctggtggacgagcacctgctgtggctggcccagcgcgaggacaaggcctgcagccgcatcgtgggtgccctggagcgcattgggggggccgccctcagcccccatgcccagcacatctcagtgaatgcgaggaacgtggcattggaggcctacctcatcaagccgcacagctacgtgggcctgacctgcacagccttccagaggagggagggaggggtgccgggcacacggccaggaagccctggccagaaccccccacctgagcccgagcccccagctgaccagcagctccgcttccgctgcaccaccgggaggcccaatgtttctctgtcgtccttccacatcaagaacagcgtggccctggcctccatccagctgcccccgagtctattctcatcccttccggctgccctggctcccccggtgcccccagactgcaccctgcaactgctcgtcttccgaaatggccgcctcttccacagccacagcaacacctcccgccctggagctgctgggcctggcaagaggcgtggcgtggccacccccgtcatcttcgcaggaaccagtggctgtggcgtgggaaacctgacagagccagtggccgtttcgctgcggcactgggctgagggagccgaacctgtggccgcttggtggagccaggaggggcccggggaggctgggggctggacctcggagggctgccagctccgctccagccagcccaatgtcagcgccctgcactgccagcacttgggcaatgtggccgtgctcatggagctgagcgcctttcccagggaggtggggggcgccggggcagggctgcaccccgtggtatacccctgcacggccttgctgctgctctgcctcttcgccaccatcatcacctacatcctcaaccacagctccatccgtgtgtcccggaaaggctggcacatgctgctgaacttgtgcttccacatagccatgacctctgctgtctttgcggggggcatcacactcaccaactaccagatggtctgccaggcggtgggcatcaccctgcactactcctccctatccacgctgctctggatgggcgtgaaggcgcgagtgctccataaggagctcacctggagggcaccccctccgcaagaaggggaccccgctctgcctactcccagtcctatgctccggttctatttgatcgctggagggattccactcattatctgtggcatcacagctgcagtcaacatccacaactaccgggaccacagcccctactgctggctggtgtggcgtccaagccttggcgccttctacatccctgtggctttgattctgctcatcacctggatctatttcctgtgcgccgggctacgcttacggggtcctctggcacagaaccccaaggcgggcaacagcagggcctccctggaggcaggggaggagctgaggggttccaccaggctcaggggcagcggccccctcctgagtgactcaggttcccttcttgctactgggagcgcgcgagtggggacgcccgggcccccggaggatggtgacagcctctattctccgggagtccagctaggggcgctggtgaccacgcacttcctgtacttggccatgtgggcctgcggggctctggcagtgtcccagcgctggctgccccgggtggtgtgcagctgcttgtacggggtggcagcctccgccctgggcctcttcgtcttcactcaccactgtgccaggcggagggacgtgagagcctcgtggcgcgcctgctgcccccctgcctctcccgcggccccccatgccccgccccgggccctgcccgccgccgcagaggacggttccccggtgttcggggaggggcccccctccctcaagtcctccccaagcggcagcagcggccatccgctggctctgggcccctgcaagctcaccaacctgcagctggcccagagtcaggtgtgcgaggcgggggcggcggccggcggggaaggagagccggagccggcgggcacccggggaaacctcgcccaccgccaccccaacaacgtgcaccacgggcgtcgggcgcacaagagccgggccaagggacaccgcgcgggggaggcctgcggcaagaaccggctcaaggccctgcgcgggggcgcggcgggggcgctggagctgctgtccagcgagagcggtagtctgcacaacagccccaccgacagctacctgggcagcagccgcaacagcccgggcgccggcctgcagctggaaggcgagcccatgctcacgccgtccgagggcagcgacaccagcgccgcgccgctttctgaggcgggccgggcaggccagcgccgcagcgccagccgcgacagtctcaagggcggcggcgcgctggagaaggagagccatcgccgctcgtacccgctcaacgccgccagcctaaacggcgcccccaaggggggcaagtacgacgacgtcaccctgatgggcgcggaggtagccagcggcggctgcatgaagaccggactctggaagagcgaaactaccgtctaaggtggggcgggcgacgcggtagacgggctggccacgcggctcgttcccccgctcctcggggccctccaaggtgtctccgtagtcagcaggttggaggcagaggagccgatggctggaggaagcccacaggcggatgttccccacttgcctagagggcatccctctggggtagcgacagacaatcccagaaacacgcataatacatttccgtccagcccggggcagtctgactgtcggtgccctcccaggaacggggaaggcctccgtctgtgtgaaagggcacagcacatcccaggtgcaccctccccaagtactcccaccccgcctactgtccatgcggcctcactgggggccatcagcctcaccagcaaagcagagatgagagcgtgggaactgtgttctttcctccctgccctctactgatttcagcccagcccctgcctagatcctaggtcccttttcctcccgagtttggctggcacgagagctagcccagcacatgaagcaggtgatgttaagtcacaaggtgctgcttttcagatccactatgcaagaggggagggtggggccacgtgaaaggcagctctagacatcaaccagtcctgggggaggggagtgggaaccgggcacaactaggaacaatgccaccattcccacaggagtggtacttaaaccagacagcagggttcagaggtggcacaccgggacaaagctgaggccctgcacctcaacagctgactgccaggtgcctgtgggtgaactgaggggagtagagggagagggcaggtggaactggggcagaatctagtcatgccctaaagctagtcctgtaaacaatggtgccccagaaagctgcaggtggtgtttggagaagcagttacttttcagttacaagacccatctccctagtctcagccttacaacaccacgggactaaggaagagcacttccttgcctccgtaaggccagaggaagaaccatcccaatcatttgatctccagctccacagtagagagaaacctacaaaatgtcaaaccagcttcccgactcccaggagctcaagccaagcccagaggcagtggctggggtccctgcaggtcatgaggggcctatgcctttactccttttaaacaccagcacccgtcttttccccaacctaaaaccaaccaccagcatttcactacaggaccaaatggaaaccgagggaaccctgggtcttgggaagaacaacaggaaaccaaggtctgacctagggttccctcccagtcttcacatcactctggcctcatcaccaaggtgacagaggacacaggggagggggaaaacccacacacactccttggaatgggtcctgttatttatgcttgctgcacagacatattagaagaaaaaaaaaagctttgtattattcttccacatatgctggctgctgtttacacaccctgccaatgccttagcactggagagctttttgcaatatgctggggaaaggggagggagggaatgaaagtgccaaagaaaacatgtttttaagaactcgggttttatacaatagaatgttttctagcagatgcctcttgttttaatatattaaaattttgcaaagccctttgagctacaaaaaaaaaaaaaaaaaaaaaaaaaaaaaaa

SEQ ID NO: 300 - DNA, 1996 bp, Homo sapiens
gcgcgatgcgcggagacccccgcgggggcggcggcggccgtgagccccgatgaggcccgagcgtccccggccgcgcggcagcgcccccggcccgatggagaccccgccgtgggacccagcccgcaacgactcgctgccgcccacgctgaccccggccgtgcccccctacgtgaagcttggcctcaccgtcgtctacaccgtgttctacgcgctgctcttcgtgttcatctacgtgcagctctggctggtgctgcgttaccgccacaagcggctcagctaccagagcgtcttcctctttctctgcctcttctgggcctccctgcggaccgtcctcttctccttctacttcaaagacttcgtggcggccaattcgctcagccccttcgtcttctggctgctctactgcttccctgtgtgcctgcagtttttcaccctcacgctgatgaacttgtacttcacgcaggtgattttcaaagccaagtcaaaatattctccagaattactcaaataccggttgcccctctacctggcctccctcttcatcagccttgttttcctgttggtgaatttaacctgtgctgtgctggtaaagacgggaaattgggagaggaaggttatcgtctctgtgcgagtggccattaatgacacgctcttcgtgctgtgtgccgtctctctctccatctgtctctacaaaatctctaagatgtccttagccaacatttacttggagtccaagggctcctccgtgtgtcaagtgactgccatcggtgtcaccgtgatactgctttacacctctcgggcctgctacaacctgttcatcctgtcattttctcagaacaagagcgtccattcctttgattatgactggtacaatgtatcagaccaggcagatttgaagaatcagctgggagatgctggatacgtattatttggagtggtgttatttgtttgggaactcttacctaccaccttagtcgtttatttcttccgagttagaaatcctacaaaggaccttaccaaccctggaatggtccccagccatggattcagtcccagatcttatttctttgacaaccctcgaagatatgacagtgatgatgaccttgcctggaacattgcccctcagggacttcagggaggttttgctccagattactatgattggggacaacaaactaacagcttcctggcacaagcaggaactttgcaagactcaactttggatcctgacaaaccaagccttgggtagcatcagttaacagttttatggacgattcctcagatgaaaagcttcagaaaagcatagtgacagctgaatttttagggcacttttccttaagaaatagaacttgatttttatttgttacaggtttccaatggccccataggaataagcaataatgtagactgataaacccttattttagtactaaagagggagccttgctatttcagtgggtataatttaaactttttaaagaaaatctgtacttttataaagatgtattttgtataacttaaataataatgctaaagtatactagggtttttttttcttgagaatgttactgcaatcatgttgtagtttgcacagacttttatgcataattcactttaaaaatatagaatatatggtctaatagttttttaaagcttttggactaaagtattccacaaatcttacctctttaggtcactgatggtcactccgattctgagtgccacattggtagactcctaaaatacagttgacaacttagccaattgcaactccagtgttgataattaaaatgaaatggtaaagcagcagactgtaaggtctttagagatttttttttaaggttcaggccgtaggttcctcaaggaatctcttaagttttgcccaaagactggtacttcctttcagtagggcgctaatgtatacacattaatgataagttgataacattaaaaatgtagctgacttatcctattaaacctcctctgctatgttcac

SEQ ID NO: 301 - DNA, 3058 bp, Homo sapiens
ggggttggaatcccgcttctcctcggcagcagtaggctcgcaagtcgctggggttaggtggggcaagagtttcgccggcgcatcagcgctgcttcggactgtttgcaacgtgtttccagcgagctgggagcggggttgtgactgcgagtcgtctgggggagggggacttgtttttcttttcctctagagacctcggcttgcaactggatcaaacgctgtcgaaaggatgtaaataggcagagcaactgttaccaagaaggccaccacccccacccaaaggcagtgaggagtgtggggcttcgtctgggctcccccgagtctcaacagtaatcaacagtcaggtgttgattgcaacttttcaaggtcagccaccgggagtagcctattccctctaggaaccttggagggcataccttgctgggactcaacttggctgagaaatgcacaagatgccaaaggaggaaggattatagggggcgtgtgtgtgacccccaagaccgatcttccgctatcaccctaatctccggttccccgctacccgggcgggggtgagtatgtgacatgtgcctaactctcagcagcaacttcggcagcaggtgtcgatcctaactaagcaggagctgcggctgccgggtgtgccctcaccaagccatgcgagccccgggcgcgcttctcgcccgcatgtcgcggctactgcttctgctactgctcaaggtgtctgcctcttctgccctcggggtcgcccctgcgtccagaaacgaaacttgtctgggggagagctgtgcacctacagtgatccagcgccgcggcagggacgcctggggaccgggaaattctgcaagagacgttctgcgagcccgagcacccagggaggagcagggggcagcgtttcttgcgggaccctcctgggacctgccggcggccccgggccgtgacccggctgcaggcagaggggcggaggcgtcggcagccggacccccgggacctccaaccaggccacctggcccctggaggtggaaaggtgctcggggtcaggagccttctgaaactttggggagagggaaccccacggccctccagctcttccttcagatctcagaggaggaagagaagggtcccagaggcgctggcatttccgggcgtagccaggagcagagtgtgaagacagtccccggagccagcgatcttttttactggccaaggagagccgggaaactccagggttcccaccacaagcccctgtccaagacggccaatggactggcggggcacgaagggtggacaattgcactcccgggccgggcgctggcccagaatggatccttgggtgaaggaatccatgagcctgggggtccccgccggggaaacagcacgaaccggcgtgtgagactgaagaaccccttctacccgctgacccaggagtcctatggagcctacgcggtcatgtgtctgtccgtggtgatcttcgggaccggcatcattggcaacctggcggtgatgtgcatcgtgtgccacaactactacatgcggagcatctccaactccctcttggccaacctggccttctgggactttctcatcatcttcttctgccttccgctggtcatcttccacgagctgaccaagaagtggctgctggaggacttctcctgcaagatcgtgccctatatagaggtcgcttctctgggagtcaccaccttcaccttatgtgctctgtgcatagaccgcttccgtgctgccaccaacgtacagatgtactacgaaatgatcgaaaactgttcctcaacaactgccaaacttgctgttatatgggtgggagctctattgttagcacttccagaagttgttctccgccagctgagcaaggaggatttggggtttagtggccgagctccggcagaaaggtgcattattaagatctctcctgatttaccagacaccatctatgttctagccctcacctacgacagtgcgagactgtggtggtattttggctgttacttttgtttgcccacgcttttcaccatcacctgctctctagtgactgcgaggaaaatccgcaaagcagagaaagcctgtacccgagggaataaacggcagattcaactagagagtcagatgaactgtacagtagtggcactgaccattttatatggattttgcattattcctgaaaatatctgcaacattgttactgcctacatggctacaggggtttcacagcagacaatggacctccttaatatcatcagccagttccttttgttctttaagtcctgtgtcaccccagtcctccttttctgtctctgcaaacccttcagtcgggccttcatggagtgctgctgctgttgctgtgaggaatgcattcagaagtcttcaacggtgaccagtgatgacaatgacaacgagtacaccacggaactcgaactctcgcctttcagtaccatacgccgtgaaatgtccacttttgcttctgtcggaactcattgctgaaggacagtacttggttgggtcagatttatttgtttgattttcatatcccgtgaaagtttttaattcatatttttccttatagggaaaaatgcaaaaaagaaacaataaagaaagaaatattaactactgtagaactgattttacaaattaatatttgtgctttgaaaaaaagtttctatttagttatttaagaagaatgagaaggccaatagttttagattattttatctggtatggtgctaatattttatttgaaaaaagttactgcaacttaacttaaaattgctaacgttttttcttcttttaaaaatacaattattgtatattgattatagcaatgtgattttgtaggttattttatatttgagttgtgattgaaagtatgttgtatatggtattgtgagatgatttgtacttggaagcattcacaaagtagcaccaaataaattacactttattctttaaaaaaaaaaaaaaaaaaaaaaaaaaaaaaaaaaaaaaaaaaaaaaaaaaaaaaaaaaaaaaaaaaaaaaaaaaaaaaaaaaaaaaaaaaaaaaaaaaaaaa

SEQ ID NO: 302 - DNA, 1046 bp, Homo sapiens
ggaacaaagagcttataaatacattaggacctggaattcagttgtcgagccaggacggtgacagcgtttaacaaagcttagagaaacctccaggagactgctatcatggcagagaagcccaagctccactacttcaatgcacggggcagaatggagtccacccggtggctcctggctgcagctggagtagagtttgaagagaaatttataaaatctgcagaagatttggacaagttaagaaatgatggatatttgatgttccagcaagtgccaatggttgagattgatgggatgaagctggtgcagaccagagccattctcaactacattgccagcaaatacaacctctatgggaaagacataaaggagagagccctgattgatatgtatatagaaggtatagcagatttgggtgaaatgatcctccttctgcccgtatgtccacctgaggaaaaagatgccaagcttgccttgatcaaagagaaaataaaaaatcgctacttccctgcctttgaaaaagtcttaaagagccatggacaagactaccttgttggcaacaagctgagccgggctgacattcatctggtggaacttctctactacgtcgaggagcttgactccagtcttatctccagcttccctctgctgaaggccctgaaaaccagaatcagcaacctgcccacagtgaagaagtttctacagcctggcagcccaaggaagcctcccatggatgagaaatctttagaagaagcaaggaagattttcaggttttaataacgcagtcatggaggccaagaacttgcaataccaatgttctaaagttttgcaacaataaagtactttacctaagtgttgattgtgcctgttgtgaagctaatgaactctttcaaattatatgctaattaaataatacaactcctattcgctgacttagttaaaattgatttgttttcattaggatctgatgtgaattcagatttccaatcttctcctagccaaccattttcctggaattaaaaattcagtaaaaaaggaaactataaaaa

SEQ ID NO: 303 - DNA, 3003 bp, Homo sapiens
cgaagtcaagacgtctggaaagaattacccagtcctggcttcgagcagcccattgaaccagagacttgaaacagccccagccaaagacttttctcccaattctgcgcttcctgggttctgctgagtcttccacaggctttttttttttttttttttttttaagacgaaaaagagattttctgttatcgggggcagaaagactgaagcacaaaaaaaaaaaaaaagaaaagaaaagaaaagaaaaaagaaaagttaatttatttttaaagcataatttttttaagaattagactgaagtgcaacggaaacataaagagaatattagtgaaattattttttaaagtggggaagaatcaaacatttaagactcccctatcctttttaaatgttgtttttaaatttcttattttttttggccggtcgtctcaaattcatctgatctcttattacctcaattttggaaactgcccgccaccgaccctccgggaccacacagacaggctgaggacgactttatgaccaagagctgaacaagatgcattgtgagaggtttctatgtatcctgagaataattggaaccacactctttggagtctctctcctccttggaatcacagctgcttatattgttggctaccagtttatccaaacggataattactatttctcttttggactgtatggtgcctttttggcatcacacctcatcatccaaagcctgtttgcctttttggagcaccgaaaaatgaaaaaatccctagaaacccccataaagttgaacaaaacagttgccctttgcatcgctgcctatcaagaagatccagactacttaaggaaatgtttgcaatctgtgaaaaggctaacctaccctgggattaaagttgtcatggtcatagatgggaactcagaagatgacctttacatgatggacatcttcagtgaagtcatgggcagagacaaatcagccacttatatctggaagaacaacttccacgaaaagggtcccggtgagacagatgagtcacataaagaaagctcgcaacacgtaacgcaattggtcttgtccaacaaaagtatctgcatcatgcaaaaatggggtggaaaaagagaagtcatgtacacagccttcagagcactgggacgaagtgtggattatgtacaggtttgtgattcagacactatgcttgacccagcctcatctgtggagatggtaaaagttttagaagaagatcccatggttggaggtgttgggggagatgtccagattttaaacaagtacgattcctggatctcattcctcagcagtgtaagatattggatggcttttaatatagaaagggcctgtcagtcttattttgggtgtgttcagtgcattagtggacctctgggaatgtacagaaactccttgttgcatgagtttgtggaagattggtacaatcaagaatttatgggcaaccaatgtagctttggtgatgacaggcatctcacgaaccgggtgctgagcctgggctatgcaacaaaatacacagctcgatctaagtgccttactgaaacacctatagagtatctcagatggctaaaccagcagacccgttggagcaagtcctacttccgagaatggctgtacaatgcaatgtggtttcacaaacatcacttgtggatgacctacgaagcgattatcactggattctttcctttctttctcattgccacagtaatccagctcttctaccggggtaaaatttggaacattctcctcttcttgttaactgtccagctagtaggtctcataaaatcatcttttgccagctgccttagaggaaatatcgtcatggtcttcatgtctctctactcagtgttatacatgtcgagtttacttcccgccaagatgtttgcaattgcaacaataaacaaagctgggtggggcacatcaggaaggaaaaccattgttgttaatttcataggactcattccagtatcagtttggtttacaatcctcctgggtggtgtgattttcaccatttataaggagtctaaaaggccattttcagaatccaaacagacagttctaattgttggaacgttgctctatgcatgctattgggtcatgcttttgacgctgtatgtagttctcatcaataagtgtggcaggcggaagaagggacaacaatatgacatggtgcttgatgtatgatcttccatgttttgacgtttgcagtcacacacaacaccttagttcctctaggggctgtacagtattgtggcatcagataatgccaccaaaggagacatatcactgctgctgggacttgaacaaagacatttatatgggtttattttcattctgccaaagtaaaacaatacatcaacaagaagaaactcagatttaacctgttatttctatgaaaatgggatgaattctttgtttatgcactttttccttactgtgcatccgcctgaaagtgttttggcctatatacctcactagccatgctttatgtgggttatcatggaagaaaaggattttggaaactcaaggaaaagttctttcaacctatacaacctaacttatggactgtttgatagatgataattttttttttttaggaaggattttctttttaactttaccaaatgaaatgccaaaggaagttttaaaggccgtggctgtgctgtatttgatataattgtactgtgtttttaaattgtgtatgccaatcttaaagacaaattttgcatattctctattttacttttctgccaaaataaacctgttcttccttttttaaaataaaataagttcttaaaaaatttatacttaaaaaatcctgcccaaaatgtgaagcttggttgactgatgttcatgatagaaagaataaaatgtttctctctctctaccttttaaaattgaatagtttatttctgtgaaagaagtatttaaactttcaatattttaactttttgtttttatttcttttagaaaaggccaatatacctatcgcg

SEQ ID NO: 304 - DNA, 1841 bp, Homo sapiens
attctcctgcctcagcctcccgagtagctgggactacaggcgccagtgaccacgcccggctaattttttgtatttttagtagagacggggtttcacccttttagccaggatggtctcgatctcctgacttcgtgatctgcccgccttggcctcccaaagtgctaggattacaggtttgagccaccgcgcccggccctgtttcctttttgtttgttcccctgataccctgtatcaggaccaggagtcagtttggcggttatgtgtggggaagaagctgggaagtcaggggctgtttctgtggacagctttccctgtcctttggaaggcacagagctctcagctgcagggaactaacagagctctgaagccgttatatgtggtcttctctcatttccagcagagcaggctcatatgaatcaaccaactgggtgaaaagataagttgcaatctgagatttaagacttgatcagataccatctggtggagggtaccaaccagcctgtctgctcattttccttcaggctgatcccataatgcatcctcaagtggtcatcttaagcctcatcctacatctggcagattctgtagctggttctgtaaaggttggtggagaggcaggtccatctgtcacactaccctgccactacagtggagctgtcacatccatgtgctggaatagaggctcatgttctctattcacatgccaaaatggcattgtctggaccaatggaacccacgtcacctatcggaaggacacacgctataagctattgggggacctttcaagaagggatgtctctttgaccatagaaaatacagctgtgtctgacagtggcgtatattgttgccgtgttgagcaccgtgggtggttcaatgacatgaaaatcaccgtatcattggagattgtgccacccaaggtcacgactactccaattgtcacaactgttccaaccgtcacgactgttcgaacgagcaccactgttccaacgacaacgactgttccaatgacgactgttccaacgacaactgttccaacaacaatgagcattccaacgacaacgactgttctgacgacaatgactgtttcaacgacaacgagcgttccaacgacaacgagcattccaacaacaacaagtgttccagtgacaacaactgtctctacctttgttcctccaatgcctttgcccaggcagaaccatgaaccagtagccacttcaccatcttcacctcagccagcagaaacccaccctacgacactgcagggagcaataaggagagaacccaccagctcaccattgtactcttacacaacagatgggaatgacaccgtgacagagtcttcagatggcctttggaataacaatcaaactcaactgttcctagaacatagtctactgacggccaataccactaaaggaatctatgctggagtctgtatttctgtcttggtgcttcttgctcttttgggtgtcatcattgccaaaaagtatttcttcaaaaaggaggttcaacaactaagtgtttcatttagcagccttcaaattaaagctttgcaaaatgcagttgaaaaggaagtccaagcagaagacaatatctacattgagaatagtctttatgccacggactaagacccagtggtgctctttgagagtttacgcccatgagtgcagaagactgaacagacatcagcacatcagacgtcttttagaccccaagacaatttttctgtttcagtttcatctggcattccaacatgtcagtgatactgggtagagtaactctctcactccaaactgtgtatagtcaacctcatcattaatgtagtcctaattttttatgct

SEQ ID NO: 305 - DNA, 576 bp, Homo sapiens
actcttctggtccccacagactcagagagaacccaccatggtgctgtctcctgccgacaagaccaacgtcaaggccgcctggggtaaggtcggcgcgcacgctggcgagtatggtgcggaggccctggagaggatgttcctgtccttccccaccaccaagacctacttcccgcacttcgacctgagccacggctctgcccaggttaagggccacggcaagaaggtggccgacgcgctgaccaacgccgtggcgcacgtggacgacatgcccaacgcgctgtccgccctgagcgacctgcacgcgcacaagcttcgggtggacccggtcaacttcaagctcctaagccactgcctgctggtgaccctggccgcccacctccccgccgagttcacccctgcggtgcacgcctccctggacaagttcctggcttctgtgagcaccgtgctgacctccaaataccgttaagctggagcctcggtggccatgcttcttgccccttgggcctccccccagcccctcctccccttcctgcacccgtacccccgtggtctttgaataaagtctgagtgggcggc

SEQ ID NO: 306 - DNA, 575 bp, Homo sapiens
actcttctggtccccacagactcagagagaacccaccatggtgctgtctcctgccgacaagaccaacgtcaaggccgcctggggtaaggtcggcgcgcacgctggcgagtatggtgcggaggccctggagaggatgttcctgtccttccccaccaccaagacctacttcccgcacttcgacctgagccacggctctgcccaggttaagggccacggcaagaaggtggccgacgcgctgaccaacgccgtggcgcacgtggacgacatgcccaacgcgctgtccgccctgagcgacctgcacgcgcacaagcttcgggtggacccggtcaacttcaagctcctaagccactgcctgctggtgaccctggccgcccacctccccgccgagttcacccctgcggtgcacgcctccctggacaagttcctggcttctgtgagcaccgtgctgacctccaaataccgttaagctggagcctcggtagccgttcctcctgcccgctgggcctcccaacgggccctcctcccctccttgcaccggcccttcctggtctttgaataaagtctgagtgggcggc

SEQ ID NO: 307 - DNA, 626 bp, Homo sapiens
acatttgcttctgacacaactgtgttcactagcaacctcaaacagacaccatggtgcatctgactcctgaggagaagtctgccgttactgccctgtggggcaaggtgaacgtggatgaagttggtggtgaggccctgggcaggctgctggtggtctacccttggacccagaggttctttgagtcctttggggatctgtccactcctgatgctgttatgggcaaccctaaggtgaaggctcatggcaagaaagtgctcggtgcctttagtgatggcctggctcacctggacaacctcaagggcacctttgccacactgagtgagctgcactgtgacaagctgcacgtggatcctgagaacttcaggctcctgggcaacgtgctggtctgtgtgctggcccatcactttggcaaagaattcaccccaccagtgcaggctgcctatcagaaagtggtggctggtgtggctaatgccctggcccacaagtatcactaagctcgctttcttgctgtccaatttctattaaaggttcctttgttccctaagtccaactactaaactgggggatattatgaagggccttgagcatctggattctgcctaataaaaaacatttattttcattgc

SEQ ID NO: 308 - DNA, 2105 bp, Homo sapiens
gtcccagctcgggagcacatcagaggcttagaggcgagtgggaagggactcagacagtgcaggacgagaaacgcccgcggcaccaaagcccctcagagcgtcgcccccgcctctagttctagaaagtcagtttcccggcactggcaccccggaacctcaggggctgccgagctgggggggcgctcaagctgcgaggatccgggctgcccgcgagacgaggagcgggcgcccaggatggggtgcatgaagtccaagttcctccaggtcggaggcaatacattctcaaaaactgaaaccagcgccagcccacactgtcctgtgtacgtgccggatcccacatccaccatcaagccggggcctaatagccacaacagcaacacaccaggaatcagggaggcaggctctgaggacatcatcgtggttgccctgtatgattacgaggccattcaccacgaagacctcagcttccagaagggggaccagatggtggtcctagaggaatccggggagtggtggaaggctcgatccctggccacccggaaggagggctacatcccaagcaactatgtcgcccgcgttgactctctggagacagaggagtggtttttcaagggcatcagccggaaggacgcagagcgccaactgctggctcccggcaacatgctgggctccttcatgatccgggatagcgagaccactaaaggaagctactctttgtccgtgcgagactacgaccctcggcagggagataccgtgaaacattacaagatccggaccctggacaacgggggcttctacatatccccccgaagcaccttcagcactctgcaggagctggtggaccactacaagaaggggaacgacgggctctgccagaaactgtcggtgccctgcatgtcttccaagccccagaagccttgggagaaagatgcctgggagatccctcgggaatccctcaagctggagaagaaacttggagctgggcagtttggggaagtctggatggccacctacaacaagcacaccaaggtggcagtgaagacgatgaagccagggagcatgtcggtggaggccttcctggcagaggccaacgtgatgaaaactctgcagcatgacaagctggtcaaacttcatgcggtggtcaccaaggagcccatctacatcatcacggagttcatggccaaaggaagcttgctggactttctgaaaagtgatgagggcagcaagcagccattgccaaaactcattgacttctcagcccagattgcagaaggcatggccttcatcgagcagaggaactacatccaccgagacctccgagctgccaacatcttggtctctgcatccctggtgtgtaagattgctgactttggcctggcccgggtcattgaggacaacgagtacacggctcgggaaggggccaagttccccatcaagtggacagctcctgaagccatcaactttggctccttcaccatcaagtcagacgtctggtcctttggtatcctgctgatggagatcgtcacctacggccggatcccttacccagggatgtcaaaccctgaagtgatccgagctctggagcgtggataccggatgcctcgcccagagaactgcccagaggagctctacaacatcatgatgcgctgctggaaaaaccgtccggaggagcggccgaccttcgaatacatccagagtgtgctggatgacttctacacggccacagagagccagtaccaacagcagccatgatagggaggaccagggcagggccagggggtgcccaggtggtggctgcaaggtggctccagcaccatccgccagggcccacacccccttcctactcccagacacccaccctcgcttcagccacagtttcctcatctgtccagtgggtaggttggactggaaaatctctttttgactcttgcaatccacaatctgacattctcaggaagcccccaagttgatatttctatttcctggaatggttggattttagttacagctgtgatttggaagggaaactttcaaaatagtgaaatgaatatttaaataaaagatataaatgccaaagtctttaccaaaaaaaaaaaaaaaaaaaa

SEQ ID NO: 309 - DNA, 2410 bp, Homo sapiens
agggagtgcgcaggactggcaagagggaagccgggctgctccacgcctttcacgccttccacctcctgcgtgtccatctgtgagaaggagccagagcccaagggagatgatggagcctgaggagtacagagagagagggagagagatggtggattacatctgccagtacctgagcactgtgcgggagagacgtgtgacgccagacgtgcagcctggctacctgcgagcccagctgcctgagagtgctcctgaggaccccgacagctgggacagcatctttggggacattgaacgaatcatcatgcctggggtggtacattggcagagcccccatatgcacgcctactacccagccctcacctcttggccctccctgctaggagacatgctggctgatgccatcaactgcttgggattcacctgggcatccagccctgcgtgtacagagctggagatgaacgtcatggactggttggcaaaaatgctgggacttccagagcacttcttgcaccaccaccccagcagccagggcggaggcgtcctgcagagcacggtcagtgaatccactttgattgccctgctggcagcaaggaagaacaaaatcctggaaatgaaaacgtctgagcccgatgctgatgagtcctgcctaaatgcccgactcgtggcctatgcctctgaccaggctcactcctctgtggaaaaggctggtttgatttcccttgtgaagatgaaatttctgcctgtggatgacaacttctcactccgaggggaagctcttcagaaggccatcgaggaagacaagcagcggggcttggtgcccgtctttgtctgtgcaacactagggaccactggggtctgtgcatttgactgcctgtcagagctgggccccatctgtgcccgtgaggggctgtggctccacatcgatgctgcttatgcaggcactgccttcctgtgccccgagttccgggggtttctgaaggggattgagtatgccgactccttcacctttaatccttccaagtggatgatggtgcattttgactgtactgggttctgggtcaaggacaagtacaagctgcagcagaccttcagtgtgaatcccatctacctcaggcatgccaactcaggcgtggccaccgacttcatgcactggcagatccccctgagccgacggtttcgctctgttaaactctggttcgtgattcggtccttcggggtgaagaatcttcaagcacatgtcagacatggtactgaaatggctaaatattttgaatctctggtcagaaacgacccttcctttgaaattcctgccaagaggcaccttggcctggtggtttttcgtctaaagggtcctaattgtctcacagaaaatgtgttaaaggaaatagctaaagctggccgtctcttcctcatcccggccactatccaggacaagttaatcatccgtttcactgtgacatcccagtttaccactagggatgacatcctgagagactggaatctcattcgagatgctgccactctcatcctgagtcagcactgtacttcccaacccagccctcgggttgggaacctcatctcccaaatcaggggtgccagagcctgggcctgtggaacgtcccttcagtctgtcagtggggcaggagatgatccagtccaggccaggaagatcatcaagcagcctcagcgtgtgggagccggtcccatgaaaagggaaaatggcctccatcttgaaaccctgctggacccagttgatgactgcttttcagaagaggccccagatgccaccaagcacaagctgtcctccttcctgttcagttacttgtctgtgcagactaagaagaagacggtgcgctccctcagttgcaacagtgtgccagtgagtgctcagaagccactgcccacagaggcctctgtgaagaatgggggctcctccagggtcagaatcttttccaggtttccagaagacatgatgatgctgaagaaaagtgccttcaaaaaactcatcaaattctacagcgtccccagctttcctgaatgcagctctcaatgtggactccagctgccctgttgccctctgcaggccatggtttagacacagggccttcagccagagtctgaggatatacttcagggactctgtgaacccctcacaattgtatgccaactttgtgtgcttatgtgtacatgcatttttcttggggcgagttcataattttaatcaaattctcataggggttcatgacccacaataggatacaaacgaagagtttaagccagcatgatccagatgggttcagcagtctggtcagtgagaaagggccgagggtagacaggcagcttctgtggttcagcttgtgacatgatatataacacagaaataaattatgcttgtccctgaaacaaaaaa

SEQ ID NO: 310 - DNA, 1157 bp, Homo sapiens
gctcacagtcatcaattatagaccccacaacatgcgccctgaagacagaatgttccatatcagagctgtgatcttgagagccctctccttggctttcctgctgagtctccgaggagctggggccatcaaggcggaccatgtgtcaacttatgccgcgtttgtacagacgcatagaccaacaggggagtttatgtttgaatttgatgaagatgagatgttctatgtggatctggacaagaaggagaccgtctggcatctggaggagtttggccaagccttttcctttgaggctcagggcgggctggctaacattgctatattgaacaacaacttgaataccttgatccagcgttccaaccacactcaggccaccaacgatccccctgaggtgaccgtgtttcccaaggagcctgtggagctgggccagcccaacaccctcatctgccacattgacaagttcttcccaccagtgctcaacgtcacgtggctgtgcaacggggagctggtcactgagggtgtcgctgagagcctcttcctgcccagaacagattacagcttccacaagttccattacctgacctttgtgccctcagcagaggacttctatgactgcagggtggagcactggggcttggaccagccgctcctcaagcactgggaggcccaagagccaatccagatgcctgagacaacggagactgtgctctgtgccctgggcctggtgctgggcctagtcggcatcatcgtgggcaccgtcctcatcataaagtctctgcgttctggccatgacccccgggcccaggggaccctgtgaaatactgtaaaggtgacaaaatatctgaacagaagaggacttaggagagatctgaactccagctgccctacaaactccatctcagcttttcttctcacttcatgtgaaaactactccagtggctgactgaattgctgacccttcaagctctgtccttatccattacctcaaagcagtcattccttagtaaagtttccaacaaatagaaattaatgacactttggtagcactaatatggagattatcctttcattgagccttttatcctctgttctcctttgaagaacccctcactgtcaccttcccgagaataccctaagaccaataaatacttcagtatttc

SEQ ID NO: 311 - DNA, 1241 bp, Homo sapiens
tttttattctttctgccaggtacatcagatccatcaggtccgagctgtgttgactaccactgcttttcccttcgtctcagttatgtcttggaagaaggctttgcggatccccggagaccttcgggtagcaactgtcaccttgatgctggcgatgctgagctccctactggctgagggcagagactctcccgaggatttcgtgttccagtttaagggcatgtgctacttcaccaacgggacggagcgcgtgcgtcttgtgaccagatacatctataaccgagaggagtacgcgcgcttcgacagcgacgtgggggtgtaccgcgcggtgacgccgcaggggcggcctgatgccgagtactggaacagccagaaggaagtcctggaggggacccgggcggagttggacacggtgtgcagacacaactacgaggtggcgttccgcgggatcttgcagaggagagtggagcccacagtgaccatctccccatccaggacagaggccctcaaccaccacaacctgctggtctgctcggtgacagatttctatccaggccagatcaaagtccggtggtttcggaatgatcaggaggagacagccggcgttgtgtccaccccccttattaggaatggtgactggactttccagatcctggtgatgctggaaatgactccccagcgtggagatgtctacacctgccacgtggagcaccccagcctccagagccccatcaccgtggagtggcgggctcagtctgaatctgcccagagcaagatgctgagtggcgttggaggcttcgtgctggggctgatcttccttgggctgggccttatcatccgtcaaaggagtcagaaagggcttctgcactgactcctgagactattttaactaggattggttatcactcttctgtgatgcctgcttatgcctgcccagaattcccagctgcctgtgtcagcttgtccccctgagatcaaagtcctacagtggctgtcacgcagccaccaggtcatctcctttcatccccaccccaaggcgctggctgtgactctgcttcctgcactgacccagagcctctgcctgtgcatggccagctgcgtctactcaggtcccaaggggtttctgtttctattctttcctcagactgctcaagagaagcacatgaaaaacattacctgactttagagcttttttacataattaaacatgatcctgagttatctgtaaaaaaaaaaaaaaaaaa

SEQ ID NO: 312 - DNA, 1267 bp, Homo sapiens
acattctcttttcttttattcttgtctgttctgcctcactcccgagctctactgactcccaacagagcgcccaagaagaaaatggccataagtggagtccctgtgctaggatttttcatcatagctgtgctgatgagcgctcaggaatcatgggctatcaaagaagaacatgtgatcatccaggccgagttctatctgaatcctgaccaatcaggcgagtttatgtttgactttgatggtgatgagattttccatgtggatatggcaaagaaggagacggtctggcggcttgaagaatttggacgatttgccagctttgaggctcaaggtgcattggccaacatagctgtggacaaagccaacctggaaatcatgacaaagcgctccaactatactccgatcaccaatgtacctccagaggtaactgtgctcacgaacagccctgtggaactgagagagcccaacgtcctcatctgtttcatagacaagttcaccccaccagtggtcaatgtcacgtggcttcgaaatggaaaacctgtcaccacaggagtgtcagagacagtcttcctgcccagggaagaccaccttttccgcaagttccactatctccccttcctgccctcaactgaggacgtttacgactgcagggtggagcactggggcttggatgagcctcttctcaagcactgggagtttgatgctccaagccctctcccagagactacagagaacgtggtgtgtgccctgggcctgactgtgggtctggtgggcatcattattgggaccatcttcatcatcaagggattgcgcaaaagcaatgcagcagaacgcagggggcctctgtaaggcacatggaggtgatggtgtttcttagagagaagatcactgaagaaacttctgctttaatggctttacaaagctggcaatattacaatccttgacctcagtgaaagcagtcatcttcagcattttccagccctatagccaccccaagtgtggatatgcctcttcgattgctccgtactctaacatctagctggcttccctgtctattgccttttcctgtatctattttcctctatttcctatcattttattatcaccatgcaatgcctctggaataaaacatacaggagtctgtctctgctatggaatgccccatggggcatctcttgtgtacttattgtttaaggtttcctcaaactgtgatttttctgaacacaataaactattttgatgatcttgggtggaaaaaaaaaaaaaaaaa

SEQ ID NO: 313 - DNA, 1229 bp, Homo sapiens
cttgcctgcttctctggcccctggtcctgtcctgttctccagcatggtgtgtctgaagctccctggaggctcctgcatgacagcgctgacagtgacactgatggtgctgagctccccactggctttgtctggggacacccgaccacgtttcctgtggcagcctaagagggagtgtcatttcttcaatgggacggagcgggtgcggttcctggacagatacttctataaccaggaggagtccgtgcgcttcgacagcgacgtgggggagttccgggcggtgacggagctggggcggcctgacgctgagtactggaacagccagaaggacatcctggagcaggcgcgggccgcggtggacacctactgcagacacaactacggggttgtggagagcttcacagtgcagcggcgagtccaacctaaggtgactgtatatccttcaaagacccagcccctgcagcaccacaacctcctggtctgctctgtgagtggtttctatccaggcagcattgaagtcaggtggttcctgaacggccaggaagagaaggctgggatggtgtccacaggcctgatccagaatggagactggaccttccagaccctggtgatgctggaaacagttcctcgaagtggagaggtttacacctgccaagtggagcacccaagcgtgacaagccctctcacagtggaatggagagcacggtctgaatctgcacagagcaagatgctgagtggagtcgggggctttgtgctgggcctgctcttccttggggccgggctgttcatctacttcaggaatcagaaaggacactctggacttcagccaacaggattcctgagctgaaatgcagatgaccacattcaaggaagaactttctgccccggctttgcaggatgaaaagctttcctgcttggcagttattcttccacaagagagggctttctcaggacctggttgctactggttcggcaactgcagaaaatgtcctcccttgtggcttcctcagctcctgcccttggcctgaagtcccagcattgatggcagcgcctcatcttcaacttttgtgctcccctttgcctaaaccgtatggcctcccgtgcatctgtattcaccctgtatgacaaacacattacattattaaatgtttctcaaagatggagttaaaaaaaaaaaaaaaaaaaaaaaaaaaaaaaaaaaaaaaaaaaaaaaaaaaaaaaaaaaaaaaaaa

SEQ ID NO: 314 - DNA, 1158 bp, Homo sapiens
gcctgctgctctggcccctggtcctgtcctcttctccagcatggtgtgtctgaagctccctggaggctccagcttggcagcgttgacagtgacactgatggtgctgagctcccgactggctttcgctggggacacccgaccacgtttcttggagctgcgtaagtctgagtgtcatttcttcaatgggacggagcgggtgcggtacctggacagatacttccataaccaggaggagttcctgcgcttcgacagcgacgtgggggagtaccgggcggtgacggagctggggcggcctgtcgccgagtcctggaacagccagaaggacctcctggagcagaagcggggccgggtggacaattactgcagacacaactacggggttggtgagagcttcacagtgcagcggcgagtccatcctcaggtgactgtgtatcctgcaaagacccagcccctgcagcaccacaacctcctggtctgctctgtgagtggtttctatccaggcagcattgaagtcaggtggttccggaacggccaggaagagaaggctggggtggtgtccacgggcctgatccagaatggagactggaccttccagaccctggtgatgctagaaacagttcctcggagtggagaggtttacacttgccaagtggagcacccaagcgtaacgagcgctctcacagtggaatggagagcacggtctgaatctgcacagagcaagatgctgagtggagtcgggggctttgtgctgggcctgctcttccttggggccgggctgttcatctacttcaggaatcagaaaggacactctggacttcagccaacaggattcctgagctgaagtgcagatgacaatttaaggaagaatcttctgccccagctttgcaggatgaaaagctttcccgcctggctgttattcttccacgagagagggctttctcaggacctagttgctactggttcagcaactgcagaaaatgtcctcccttgtggcttcctcagttcctgcccttggcctgaagtcccagcattgatggcagcgcctcatcttcaacttttgtgctcccctttgcctaaaccctatggcctcctgtgcatctgtactcaccctgtaccacaaacacattacattattaaatgtttctcaaagatggagtt

SEQ ID NO: 315 - DNA, 1235 bp, Homo sapiens
gaatacagaatgtgggcaaactcgcttctgtgccggccgccagaaggtttgctgagggcaatcactccctggtgccgggctccttgaggttatgcactgggacatctagagcctattgtttgaggaatgcagtcttgcaagcctgctctggatcaagccacagactgaaacacccccgaagagcaagcacgtttcttggagcaggctaagtgtgagtgtcatatcttcaatgggatgaagcgggtgcagtacctgaacagatacatccataaacgggaggagaacctgcgcttcgacagcaacgtggaggagttccaggcagttacggaactggggcggcctgtcgcagagaactggaacagccagaagggcatcccggaggagaagcgggacaagatggacgactactgcagatacaattacggggttttttgagagcttcacagtgcagccgcgagtccatcctaaggtgactgtgtatcctgcaaagacccagcccctgcatcaccgcaaccccctggtcggctctgtgagtggtttctatccaggcagcattaaagtcaggtggttccagaatggtcaggaagagaaggctgcggtggtctccataggcctgatccagaatggagattggaccttccagaccctggtgatgctggaaacagttcctcggagtggagaggtttacacctgccaagtggagcatccaagcgtgacgagccctctcacagtggaatggagtacacggactgaatctgcacagagcaagatgctgagtggagtcgggggctttgtgctgggcctgctcttccttgggacagggctgttcatctacttcaggaatcagaaaggacactctggacttcagccaacaggactcctgcgctggactcctgagctgaagtgcacatgaccacattcaaggaagaaccttctgccacagctttgcaggatgaaaagctttcccacttggctcttattcttccacaagagctctctcaggaccaggttgttactcgttcagcaactctgcagaaaatgccctcccttgtggcttcctcagctcctgttcttggcctgaaaccccacagccttgatggcagcgcctcgtcttcaacttttgtgcttccttttacctaaattttcctgcctcccctgggtctgtattccccttgtgccacaaacacattgcattattcaatgtttctcaaacatggagttaaaaattatctggt

SEQ ID NO: 316 - DNA, 2129 bp, Homo sapiens
tctgcgccgccatgtcgcggaggctgctgccccgggcggagaagcggcgtcggcggctggagcagaggcagcagccggacgagcagcggaggcggtcgggagcgatggtgaagatggcggcggcgggcggcggaggcggcggtggccgctactacggcggcggcagtgagggcggccgggcccctaagcggctcaagactgacaacgccggcgaccagcacggaggcggcggcggtggcggtggaggagccggggcggcgggcggcggcggcggtggggagaactacgatgacccgcacaaaacccctgcctccccagttgtccacatcaggggcctgattgacggtgtggtggaagcagaccttgtggaggccttgcaggagtttggacccatcagctatgtggtggtaatgcctaaaaagagacaagcactggtggagtttgaagatgtgttgggggcttgcaacgcagtgaactacgcagccgacaaccaaatatacattgctggtcacccagcttttgtcaactactctaccagccagaagatctcccgccctggggactcggatgactcccggagcgtgaacagtgtgcttctctttaccatcctgaaccccatttattcgatcaccacggatgttctttacactatctgtaatccttgtggccctgtccagagaattgtcattttcaggaagaatggagttcaggcgatggtggaatttgactcagttcaaagtgcccagcgggccaaggcctctctcaatggggctgatatctattctggctgttgcactctgaagatcgaatacgcaaagcctacacgcttgaatgtgttcaagaatgatcaggatacttgggactacacaaaccccaatctcagtggacaaggtgaccctggcagcaaccccaacaaacgccagaggcagccccctctcctgggagatcaccccgcagaatatggagggccccacggtgggtaccacagccattaccatgatgagggctacgggccccccccacctcactacgaagggagaaggatgggtccaccagtggggggtcaccgtcggggcccaagtcgctacggcccccagtatgggcaccccccaccccctcccccaccacccgagtatggccctcacgccgacagccctgtgctcatggtctatggcttggatcaatctaagatgaactgtgaccgagtcttcaatgtcttctgcttatatggcaatgtggagaaggtgaaattcatgaaaagcaagccgggggccgccatggtggagatggctgatggctacgctgtagaccgggccattacccacctcaacaacaacttcatgtttgggcagaagctgaatgtctgtgtctccaagcagccagccatcatgcctggtcagtcatacgggttggaagacgggtcttgcagttacaaagacttcagtgaatcccggaacaatcggttctccaccccagagcaggcagccaagaaccgcatccagcaccccagcaacgtgctgcacttcttcaacgccccgctggaggtgaccgaggagaacttctttgagatctgcgatgagctgggagtgaagcggccatcttctgtgaaagtattctcaggcaaaagtgagcgcagctcctctggactgctggagtgggaatccaagagcgatgccctggagactctgggcttcctgaaccattaccagatgaaaaacccaaatggtccatacccttacactctgaagttgtgtttctccactgctcagcacgcctcctaattaggtgcctaggaagagtcccatctgagcaggaagacatttctctttcctttatgccattttttgtttttgttatttgcaaaagatcttgtattccttttttttttttttttttttttttttaaatgctaggtttgtagaggcttacttaaccttaatggaaacgctggaaatctgcagggggagggagaggggaactgttatctcccaagattaaccttcacttttaaaaaattattgtacatgtgatttttttttttcctgttcatacatttgtgctgcccatgtactcttggcacatttcaataaaattgtttggaaaataaacacagcaaaaaaaaaaaaaaa

SEQ ID NO: 317 - DNA, 1895 bp, Homo sapiens
ctcttttcgatccgggacggccggtcaggctcgccgccgagctggagaactacgatgacccgcacaaaacccctgcctccccagttgtccacatcaggggcctgattgacggtgtggtggaagcagaccttgtggaggccttgcaggagtttggacccatcagctatgtggtggtaatgcctaaaaagagacaagcactggtggagtttgaagatgtgttgggggcttgcaacgcagtgaactacgcagccgacaaccaaatatacattgctggtcacccagcttttgtcaactactctaccagccagaagatctcccgccctggggactcggatgactcccggagcgtgaacagtgtgcttctctttaccatcctgaaccccatttattcgatcaccacggatgttctttacactatctgtaatccttgtggccctgtccagagaattgtcattttcaggaagaatggagttcaggcgatggtggaatttgactcagttcaaagtgcccagcgggccaaggcctctctcaatggggctgatatctattctggctgttgcactctgaagatcgaatacgcaaagcctacacgcttgaatgtgttcaagaatgatcaggatacttgggactacacaaaccccaatctcagtggacaaggtgaccctggcagcaaccccaacaaacgccagaggcagccccctctcctgggagatcaccccgcagaatatggagggccccacggtgggtaccacagccattaccatgatgagggctacgggccccccccacctcactacgaagggagaaggatgggtccaccagtggggggtcaccgtcggggcccaagtcgctacggcccccagtatgggcaccccccaccccctcccccaccacccgagtatggccctcacgccgacagccctgtgctcatggtctatggcttggatcaatctaagatgaactgtgaccgagtcttcaatgtcttctgcttatatggcaatgtggagaaggtgaaattcatgaaaagcaagccgggggccgccatggtggagatggctgatggctacgctgtagaccgggccattacccacctcaacaacaacttcatgtttgggcagaagctgaatgtctgtgtctccaagcagccagccatcatgcctggtcagtcatacgggttggaagacgggtcttgcagttacaaagacttcagtgaatcccggaacaatcggttctccaccccagagcaggcagccaagaaccgcatccagcaccccagcaacgtgctgcacttcttcaacgccccgctggaggtgaccgaggagaacttctttgagatctgcgatgagctgggagtgaagcggccatcttctgtgaaagtattctcaggcaaaagtgagcgcagctcctctggactgctggagtgggaatccaagagcgatgccctggagactctgggcttcctgaaccattaccagatgaaaaacccaaatggtccatacccttacactctgaagttgtgtttctccactgctcagcacgcctcctaattaggtgcctaggaagagtcccatctgagcaggaagacatttctctttcctttatgccattttttgtttttgttatttgcaaaagatcttgtattccttttttttttttttttttttttttttaaatgctaggtttgtagaggcttacttaaccttaatggaaacgctggaaatctgcagggggagggagaggggaactgttatctcccaagattaaccttcacttttaaaaaattattgtacatgtgatttttttttttcctgttcatacatttgtgctgcccatgtactcttggcacatttcaataaaattgtttggaaaataaacacagcaaaaaaaaaaaaaaa

SEQ ID NO: 318 - DNA, 1830 bp, Homo sapiens
gtgaagcacagggttataacgaccacgatccacaaatcaagccctccaaaatcacccaaatgagctcgtactttgtaaactccttctcggggcgttatccaaatggcccggactatcagttgctaaattatggcagtggcagctctctgagcggctcttacagggatcccgctgccatgcacaccggctcttacggctacaattacaatgggatggacctcagcgtcaaccgctcctcggcctcctccagccactttggggcggtgggcgagagctcgcgcgccttccccgcgcccgcccaggagccccgcttcaggcaagcggcttcgagctgctccctgtcctcgcccgagtccctgccctgcaccaacggcgacagccacggcgccaagccctctgcttcgtccccctccgaccaggcgacctcagccagctccagcgccaatttcaccgaaatagacgaggccagcgcgtcctcggagcctgaggaagcggcaagccagctaagcagccccagcctagctcgggcgcagccagagcccatggccacctccacagccgcgcccgaggggcagactccgcaaatattcccctggatgaggaagcttcacatcagccatgatatgaccgggccggacgggaaaagggcccggaccgcgtatacccgctaccagaccctggagctggaaaaggagttccacttcaaccgctacctgacccggcgacggcgcatcgagatcgcccacgcactctgcctgtccgagcgccagatcaagatctggttccagaaccggcgcatgaagtggaagaaggacaacaaattgaaaagtatgagcctggctacagctggcagcgccttccagccctgagcccgcccagaggagcccagcggcccaagagcccgtgccacccccagccctggcccctccaatcctccccgctctgccgccgcccgctggggaccggttcccacaagcctgcctcgccttgtgttacgatatttcgtttggtcttaggtcttcctgtggctccctctctcctggactggttatcttgttattattgttaataataattattattattattttccttccatgctcccaactcccttctgcttgtcccaaatccgccagtgtttctgaatgtttgtgtctgtggttgcagtctttcccccaggaaaaaaaaaaaaagaaattcgcatgtttaatgtgaactctcccctccccatctgtgttctaacttatttataaaaagatgatcgctgtattttgagtttcagctggaaacttctgtaaggggcagcagttgaggtggggtagtgccgcagtggggtcaagctgagctggcttcggagatggagtcccttttcattctcctcctcctccctcctcactccctaggcccaagtctcctaggggcttggtcctagggtgggaaggggctagggaggaccaaagggatggtattgagaagagagaaagaagatagtgagatttaagttcctgctgcctgggtaggccccacaaggcctggtctgggagtatacggaaacaaaaatgatcctcagtgcaaaatgtcttgtgtatttctctgtgaatccatgggtctggctagagggcccaaagcttgtaaatatggggatagtctgggtcagacccatctctcccttacccatcttgcttccaagaccatttgtagtgagcgagtggatgctgtgctacgtgtgaaatctgtctttgcggggcctgtctcagtgattcgcttttggtatttgtttgtagctttcctggaagtcaaataaatgtttcccccactccaaaaaaaaaa

SEQ ID NO: 319 - DNA, 1686 bp, Homo sapiens
caccacacctaggtcggagcactgtcgtccttcagggctccagcctcttgatatttttgtacttcagtatcagctcgatagagcaaaagagagagaggacgagagagggggtcagagaaggggaagcaacggctctcacgttgggacaatattatctggaagctgaagaagaaactgaatactccttccttcctccccacccattcctttaaatccggagggggaaaaaatcccaaggtctgcaaaggcgcggcgctcggactataaaacacaacaaatcataaacccggcggagcagcagcggccgcgcgcgcctcccctcccaatgagttcctatttcgtgaactccaccttccccgtcactctggccagcgggcaggagtccttcctgggccagctaccgctctattcgtcgggctatgcggacccgctgagacattaccccgcgccctacgggccagggccgggccaggacaagggctttgccacttcctcctattacccgccggcgggcggtggctacggccgagcggcgccctgcgactacgggccggcgccggccttctaccgcgagaaagagtcggcctgcgcactctccggcgccgacgagcagcccccgttccaccccgagccgcggaagtcggactgcgcgcaggacaagagcgtgttcggcgagacagaagagcagaagtgctccactccggtctacccgtggatgcagcggatgaattcgtgcaacagttcctcctttgggcccagcggccggcgaggccgccagacatacacacgttaccagacgctggagctggagaaggagtttcactacaatcgctacctgacgcggcggcggcgcatcgagatcgcgcacgccctgtgcctgacggagaggcagatcaagatatggttccagaaccgacgcatgaagtggaaaaaggagagcaaactgctcagcgcgtctcagctcagtgccgaggaggaggaagaaaaacaggccgagtgaaggtgctggaaagggagggaggacgcgaggggaaaggcctgtggggagccgagggcgtcagagagacccgggaaggaaggctctcgggtgggggagccaggagacctgctctccggcgcagacaggcggggcccagcgctctcctggacgcccccgcccgcacagctcccggcgggtgctctgaggcctcactactcgagcccacccagcatcccgcgcgcccttccttcccgaggaactcgcctcagcctgatcaggcttcctggtgagaactgaggagcggactcacttgatgtttcctggaagcagagcaaaatgctcttgtccctgtcgcgtctcattttgtccatgtcccccgtgcacggttcaatggtagattcgctgtcccctcagcgggggccttgaagactccctgatcccagacctgtcgtctctcccaccccctccccaaagccactggaaggagcacatactacctagaagtaagaagaggagcctcagaagaaaacaaagttctattttattaattttctatgtgttgtgtttgtagtcttgtcttagctctggacgtgaaatacttcgatgatgatgatgatgatgatgatgataataataataataataacaacaacaacaacaataataaagatgtgaaaactcgacgctcggtcacctcaaaaaaaaaa

SEQ ID NO: 320 - DNA, 1415 bp, Homo sapiens
ggaggagggagagagagagaagagaagaaaaagaaaaaagaacatcaataaaaagaagtcagatttgttcgaaatcttgaggagtcttcaggccagctccctgtcggatggcttttatgaaaaaatatctcctccccattctggggctcttcatggcctactactactattctgcaaacgaggaattcagaccagagatgctccaaggaaagaaagtgattgtcacaggggccagcaaagggatcggaagagagatggcttatcatctggcgaagatgggagcccatgtggtggtgacagcgaggtcaaaagaaactctacagaaggtggtatcccactgcctggagcttggagcagcctcagcacactacattgctggcaccatggaagacatgaccttcgcagagcaatttgttgcccaagcaggaaagctcatgggaggactagacatgctcattctcaaccacatcaccaacacttctttgaatctttttcatgatgatattcaccatgtgcgcaaaagcatggaagtcaacttcctcagttacgtggtcctgactgtagctgccttgcccatgctgaagcagagcaatggaagcattgttgtcgtctcctctctggctgggaaagtggcttatccaatggttgctgcctattctgcaagcaagtttgctttggatgggttcttctcctccatcagaaaggaatattcagtgtccagggtcaatgtatcaatcactctctgtgttcttggcctcatagacacagaaacagccatgaaggcagtttctgggatagtccatatgcaagcagctccaaaggaggaatgtgccctggagatcatcaaagggggagctctgcgccaagaagaagtgtattatgacagctcactctggaccactcttctgatcagaaatccatgcaggaagatcctggaatttctctactcaacgagctataatatggacagattcataaacaagtaggaactccctgagggctgggcatgctgagggattttgggactgttctgtctcatgtttatctgagctcttatctatgaagacatcttcccagagtgtccccagagacatgcaagtcatgggtcacacctgacaaatggaaggagttcctctaacatttgcaaaatggaaatgtaataataatgaatgtcatgcaccgctgcagccagcagttgtaaaattgttagtaaacataggtataattaccagatagttatattaaatttatatcttatatataataatatgtgatgattaatacaatattaattataataaaggtcacataaactttataaattcataactggtagctataacttgagcttattcaggatggtttctttaaaaccataaactgtacaaatgaaatttttcaatatttgtttctta

SEQ ID NO: 321 - DNA, 1405 bp, Homo sapiens
acaattcagaggctgctgcctgcttaggaggttgtagaaagctctgtaggttctctctgtgtgtcctacaggagtcttcaggccagctccctgtcggatggcttttatgaaaaaatatctcctccccattctggggctcttcatggcctactactactattctgcaaacgaggaattcagaccagagatgctccaaggaaagaaagtgattgtcacaggggccagcaaagggatcggaagagagatggcttatcatctggcgaagatgggagcccatgtggtggtgacagcgaggtcaaaagaaactctacagaaggtggtatcccactgcctggagcttggagcagcctcagcacactacattgctggcaccatggaagacatgaccttcgcagagcaatttgttgcccaagcaggaaagctcatgggaggactagacatgctcattctcaaccacatcaccaacacttctttgaatctttttcatgatgatattcaccatgtgcgcaaaagcatggaagtcaacttcctcagttacgtggtcctgactgtagctgccttgcccatgctgaagcagagcaatggaagcattgttgtcgtctcctctctggctgggaaagtggcttatccaatggttgctgcctattctgcaagcaagtttgctttggatgggttcttctcctccatcagaaaggaatattcagtgtccagggtcaatgtatcaatcactctctgtgttcttggcctcatagacacagaaacagccatgaaggcagtttctgggatagtccatatgcaagcagctccaaaggaggaatgtgccctggagatcatcaaagggggagctctgcgccaagaagaagtgtattatgacagctcactctggaccactcttctgatcagaaatccatgcaggaagatcctggaatttctctactcaacgagctataatatggacagattcataaacaagtaggaactccctgagggctgggcatgctgagggattttgggactgttctgtctcatgtttatctgagctcttatctatgaagacatcttcccagagtgtccccagagacatgcaagtcatgggtcacacctgacaaatggaaggagttcctctaacatttgcaaaatggaaatgtaataataatgaatgtcatgcaccgctgcagccagcagttgtaaaattgttagtaaacataggtataattaccagatagttatattaaatttatatcttatatataataatatgtgatgattaatacaatattaattataataaaggtcacataaactttataaattcataactggtagctataacttgagcttattcaggatggtttctttaaaaccataaactgtacaaatgaaatttttcaatatttgtttctta

SEQ ID NO: 322 - DNA, 1427 bp, Homo sapiens
ctgggaatatgattatgcttaatctatgctcagtcgaaaggggctggggctgctttctcccctcccttcttgactctctgttcacagaactcaggctgcctccagccagcctttgcccgctagactcactggccctgagcacttgaaggtgcagcaagtcactgagaatgagcactttcttctcggacacagcatggatctgcctggctgtccccacagtactatgtgggacagtattttgcaaatacaagaagagctcagggcagctgtggagctggatggtctgcctggcaggcctctgtgcagtctgcctgctcatcctgtcccctttttggggcttgatcctcttctcggtgtcatgcttcctcatgtatacttacttatctggccaagaattgttacctgtggatcagaaggcagtcctggtgacaggtggtgattgcgggcttggccatgctttgtgcaagtatctggatgagctgggcttcacggtatttgccggagttttgaatgaaaatggcccaggagctgaggaattgcgaagaacctgctctccgcgcctctcggtgctccaaatggacatcacgaagccagtgcagataaaagatgcttacagcaaggttgcagcaatgctgcaggacagaggactgtgggctgtgatcaacaatgctggggtgcttggctttccaactgatggggagcttcttcttatgactgactacaaacaatgcatggccgtgaacttctttggaactgtggaggtcacaaagacgtttttgcctcttcttagaaaatccaaagggaggctggtgaatgtcagcagcatgggaggaggggccccaatggaaaggctggcatcttatggctcatcaaaggcggctgtgaccatgttctcatcagttatgagactggagctttccaagtggggaattaaagttgcttccatccaacctggaggcttcctaacaaatatcgcaggcaccagtgacaagtgggaaaagctggagaaggacattctggaccacctccccgctgaggtacaggaagactacggccaggactacatcttagcacagcggaatttcctcctattgatcaactcgttagccagcaaggacttctctccggtgctgcgggacatccagcatgctatcttggcgaagagcccttttgcctattacacgccagggaaaggcgcttacttgtggatctgccttgctcactatttgcctattggcatatatgattactttgctaaaagacattttggccaagacaagcccatgcccagagctctaagaatgcctaactacaagaaaaaggccacctaggcaatggaagccctcaaagaagtcggaatgtcatagtcttgaaatgaaagggaaactgggaaactgggtttctcattaaagttgtttcccactctg

SEQ ID NO: 323 - DNA, 1512 bp, Homo sapiens
agcagttggggcaggaggaagccgactgctgcctggtctgcaaagaagtcctttcaagtctctaggactggactcttcctaagcaagtccgagaaggaagcaccctcactatgtggctctacctggcggccttcgtgggcctgtactaccttctgcactggtaccgggagaggcaggtggtgagccacctccaagacaagtatgtctttatcacgggctgtgactcgggctttgggaacctgctggccagacagctggatgcacgaggcttgagagtgctggctgcgtgtctgacggagaagggggccgagcagctgaggggccagacgtctgacaggctggagacggtgaccctggatgttaccaagatggagagcatcgctgcagctactcagtgggtgaaggagcatgtgggggacagaggactctggggactggtgaacaatgcaggcattcttacaccaattaccttatgtgagtggctgaacactgaggactctatgaatatgctcaaagtgaacctcattggtgtgatccaggtgaccttgagcatgcttcctttggtgaggagagcacggggaagaattgtcaatgtctccagcattctgggaagagttgctttctttgtaggaggctactgtgtctccaagtatggagtggaagccttttcagatattctgaggcgtgagattcaacattttggggtgaaaatcagcatagttgaacctggctacttcagaacgggaatgacaaacatgacacagtccttagagcgaatgaagcaaagttggaaagaagcccccaagcatattaaggagacctatggacagcagtattttgatgccctttacaatatcatgaaggaagggctgttgaattgtagcacaaacctgaacctggtcactgactgcatggaacatgctctgacatcggtgcatccgcgaactcgatattcagctggctgggatgctaaatttttcttcatccctctatcttatttacctacatcactggcagactacattttgactagatcttggcccaaaccagcccaggcagtctaaagaaaactgggttggtgcttcttggaatgaaggcaaaaatctgaaattgttagtgtctcagtaatcctgatttagaacccaggctttttgtaacaatgtgttttcttgcctaaattcatttatctggcatcatcagagtactaacatgtttatatttcagatatccaaagcttaccactttaggtgatgaatctttactattttagcccttttttgatgagactatttgtctaaagtgaatcatttgttcttgccttattaaacagagtagatggaaaacaatttaacctattttgaagtcatttctttatgaatatgaataattgttctatgctttaataatctattgtgaggaaactactaagaaatatgttggtgtgtttgtccttacttgaaatgggtctgtattatggtacttttaataaatatttgatttttctttctcttc

SEQ ID NO: 324 - DNA, 1689 bp, Homo sapiens
aggaaatgaggtgagaagtacgtccactcttctgtccagcttttaacaatctaactaatgccctctccagggtcaccctagaatcagatctgctccccagcatcttctgtttcctggtgagtgattcctgctactttggatggccatgacgggctggagctgccttgtgacaggagcaggagggtttctgggacagaggatcatccgcctcttggtgaaggagaaggagctgaaggagatcagggtcttggacaaggccttcggaccagaattgagagaggaattttctaaactccagaacaagaccaagctgacagtgctggaaggagacattctggatgagccattcctgaagagagcctgccaggacgtctcggtcatcatccacaccgcctgtatcattgatgtcttcggtgtcactcacagagagtctatcatgaatgtcaatgtgaaaggtacccagctcctgttagaggcctgtgtccaagctagtgtgccagtcttcatctacaccagtagcatagaggtagccgggcccaactcctacaaggaaatcatccagaatggccatgaagaagagcctctggaaaacacatggcccgctccatacccacacagcaaaaagcttgctgagaaggctgtactggcggctaacgggtggaatctgaaaaacggcggcaccctgtacacttgtgccttacgacccatgtatatctatggggaaggaagccgattcctttctgctagtataaacgaggccctgaacaacaatgggatcctgtcaagtgttggaaagttctccactgttaacccagtctatgttggcaatgtggcctgggcccacattctggccttgagggccctgcaggaccccaagaaggccccaagcatccgaggacagttctactatatctcagatgacacgcctcaccaaagctatgataaccttaattacaccctgagcaaagagttcggcctccgccttgattccagatggagctttcctttatccctgatgtattggattggcttcctgctggaaatagtgagcttcctactcaggccaatttacacctatcgaccgcccttcaaccgccacatagtcacattgtcaaatagcgtattcaccttctcttataagaaggctcagcgagatctggcgtataagccactctacagctgggaggaagccaagcagaaaacggtggagtgggttggttcccttgtggaccggcacaaggagaccctgaagtccaagactcagtgatttaaggatgacagagatgtgcatgtgggtattgttaggagatgtcatcaagctccaccctcctggcctcatacagaaagtgacaagggcacaagctcaggtcctgctgcctccctttcatacaatggccaacttattgtattcctcatgtcatcaaaacctgcgcagtcattggcccaacaagaaggtttctgtcctaatcatataccagaggaaagaccatgtggtttgctgttaccaaatctcagtagctgattctgaacaatttagggactcttttaacttgagggtcgttttgactactagagctccatttctactcttaaatgagaaaggatttcctttctttttaatcttccattccttcacatagtttgataaaaagatcaataaatgtttgaatgtttaatgtgaaaaaaaaa

SEQ ID NO: 325 - DNA, 1669 bp, Homo sapiens
gaggcagtaaggacttggactcctctgtccagcttttaacaatctaagttacgccctcttctgggtcacgctagaatcagatctgctctccagcatcttctgtttcctggcaagtgtttcctgctactttggattggccacgatgggctggagctgccttgtgacaggagcaggagggcttctgggtcagaggatcgtccgcctgttggtggaagagaaggaactgaaggagatcagggccttggacaaggccttcagaccagaattgagagaggaattttctaagctccagaacaggaccaagctgactgtacttgaaggagacattctggatgagccattcctgaaaagagcctgccaggacgtctcggtcgtcatccacaccgcctgtatcattgatgtctttggtgtcactcacagagagtccatcatgaatgtcaatgtgaaaggtacccagctactgttggaggcctgtgtccaagccagtgtgccagtcttcatctacaccagtagcatagaggtagccgggcccaactcctacaaggaaatcatccagaacggccacgaagaagagcctctggaaaacacatggcccactccatacccgtacagcaaaaagcttgctgagaaggctgtgctggcggctaatgggtggaatctaaaaaatggtgataccttgtacacttgtgcgttaagacccacatatatctatggggaaggaggcccattcctttctgccagtataaatgaggccctgaacaacaatgggatcctgtcaagtgttggaaagttctctacagtcaacccagtctatgttggcaacgtggcctgggcccacattctggccttgagggctctgcgggaccccaagaaggccccaagtgtccgaggtcaattctattacatctcagatgacacgcctcaccaaagctatgataaccttaattacatcctgagcaaagagtttggcctccgccttgattccagatggagccttcctttaaccctgatgtactggattggcttcctgctggaagtagtgagcttcctactcagcccaatttactcctatcaaccccccttcaaccgccacacagtcacattatcaaatagtgtgttcaccttctcttacaagaaggctcagcgagatctggcgtataagccactctacagctgggaggaagccaagcagaaaaccgtggagtgggttggttcccttgtggaccggcacaaggagaccctgaagtccaagactcagtgatttaaggatgacagagatgtgcatgtgggtattgttaggaaatgtcatcaaactccacccacctggcttcatacagaaggcaacaggggcacaagcccaggtcctgctgcctctctttcacacaatgcccaacttactgtcttcttcatgtcatcaaaatctgcacagtcactggcccaaccagaactttctgtcctaatcatacaccagaagacaaacaatatgatttgctgttaccaaatctcagtggctgattctgaacaattgtggtctctcttaacttgaggttctcttttgactaatagagctccatttcccctcttaaatgagaaagcatttcttttctctttaatctcctattccttcacacagttcaacataaagagcaataaatgttttaatgcttaa

SEQ ID NO: 326 - DNA, 865 bp, Homo sapiens
ctcaaacaccgcctgctaaaaatacccgactggaggagcataaaagcgcagccgagcccagcgccccgcacttttctgagcagacgtccagagcagagtcagccagcatgaccgagcgccgcgtccccttctcgctcctgcggggccccagctgggaccccttccgcgactggtacccgcatagccgcctcttcgaccaggccttcgggctgccccggctgccggaggagtggtcgcagtggttaggcggcagcagctggccaggctacgtgcgccccctgccccccgccgccatcgagagccccgcagtggccgcgcccgcctacagccgcgcgctcagccggcaactcagcagcggggtctcggagatccggcacactgcggaccgctggcgcgtgtccctggatgtcaaccacttcgccccggacgagctgacggtcaagaccaaggatggcgtggtggagatcaccggcaagcacgaggagcggcaggacgagcatggctacatctcccggtgcttcacgcggaaatacacgctgccccccggtgtggaccccacccaagtttcctcctccctgtcccctgagggcacactgaccgtggaggcccccatgcccaagctagccacgcagtccaacgagatcaccatcccagtcaccttcgagtcgcgggcccagcttgggggcccagaagctgcaaaatccgatgagactgccgccaagtaaagccttagcctggatgcccacccctgctgccgccactggctgtgcctcccccgccacctgtgtgttcttttgatacatttatcttctgtttttctcaaataaagttcaaagcaaccacctgtaaaaaaaaaaaaaaaaaa

SEQ ID NO: 327 - DNA, 2133 bp, Homo sapiens
gcggccgcgcgcactcgcacccgctgcccccgaggccctcctgcactctccccggcgccgctctccggccctcgccctgtccgccgccaccgccgccgccgccagagtcgccatgcagatcccgcgcgccgctcttctcccgctgctgctgctgctgctggcggcgcccgcctcggcgcagctgtcccgggccggccgctcggcgcctttggccgccgggtgcccagaccgctgcgagccggcgcgctgcccgccgcagccggagcactgcgagggcggccgggcccgggacgcgtgcggctgctgcgaggtgtgcggcgcgcccgagggcgccgcgtgcggcctgcaggagggcccgtgcggcgaggggctgcagtgcgtggtgcccttcggggtgccagcctcggccacggtgcggcggcgcgcgcaggccggcctctgtgtgtgcgccagcagcgagccggtgtgcggcagcgacgccaacacctacgccaacctgtgccagctgcgcgccgccagccgccgctccgagaggctgcaccggccgccggtcatcgtcctgcagcgcggagcctgcggccaagggcaggaagatcccaacagtttgcgccataaatataactttatcgcggacgtggtggagaagatcgcccctgccgtggttcatatcgaattgtttcgcaagcttccgttttctaaacgagaggtgccggtggctagtgggtctgggtttattgtgtcggaagatggactgatcgtgacaaatgcccacgtggtgaccaacaagcaccgggtcaaagttgagctgaagaacggtgccacttacgaagccaaaatcaaggatgtggatgagaaagcagacatcgcactcatcaaaattgaccaccagggcaagctgcctgtcctgctgcttggccgctcctcagagctgcggccgggagagttcgtggtcgccatcggaagcccgttttcccttcaaaacacagtcaccaccgggatcgtgagcaccacccagcgaggcggcaaagagctggggctccgcaactcagacatggactacatccagaccgacgccatcatcaactatggaaactcgggaggcccgttagtaaacctggacggtgaagtgattggaattaacactttgaaagtgacagctggaatctcctttgcaatcccatctgataagattaaaaagttcctcacggagtcccatgaccgacaggccaaaggaaaagccatcaccaagaagaagtatattggtatccgaatgatgtcactcacgtccagcaaagccaaagagctgaaggaccggcaccgggacttcccagacgtgatctcaggagcgtatataattgaagtaattcctgataccccagcagaagctggtggtctcaaggaaaacgacgtcataatcagcatcaatggacagtccgtggtctccgccaatgatgtcagcgacgtcattaaaagggaaagcaccctgaacatggtggtccgcaggggtaatgaagatatcatgatcacagtgattcccgaagaaattgacccataggcagaggcatgagctggacttcatgtttccctcaaagactctcccgtggatgacggatgaggactctgggctgctggaataggacactcaagacttttgactgccattttgtttgttcagtggagactccctggccaacagaatccttcttgatagtttgcaggcaaaacaaatgtaatgttgcagatccgcaggcagaagctctgcccttctgtatcctatgtatgcagtgtgctttttcttgccagcttgggccattcttgcttagacagtcagcatttgtctcctcctttaactgagtcatcatcttagtccaactaatgcagtcgatacaatgcgtagatagaagaagccccacgggagccaggatgggactggtcgtgtttgtgcttttctccaagtcagcacccaaaggtcaatgcacagagaccccgggtgggtgagcgctggcttctcaaacggccgaagttgcctcttttaggaatctctttggaattgggagcacgatgactctgagtttgagctattaaagtacttcttacacattgaaaaaaaaaaaaaaaaaaaaaaaaaaaaaa

SEQ ID NO: 328 - DNA, 2986 bp, Homo sapiens
gcgccccagtcgacgctgagctcctctgctactcagagttgcaacctcagcctcgctatggctcccagcagcccccggcccgcgctgcccgcactcctggtcctgctcggggctctgttcccaggacctggcaatgcccagacatctgtgtccccctcaaaagtcatcctgccccggggaggctccgtgctggtgacatgcagcacctcctgtgaccagcccaagttgttgggcatagagaccccgttgcctaaaaaggagttgctcctgcctgggaacaaccggaaggtgtatgaactgagcaatgtgcaagaagatagccaaccaatgtgctattcaaactgccctgatgggcagtcaacagctaaaaccttcctcaccgtgtactggactccagaacgggtggaactggcacccctcccctcttggcagccagtgggcaagaaccttaccctacgctgccaggtggagggtggggcaccccgggccaacctcaccgtggtgctgctccgtggggagaaggagctgaaacgggagccagctgtgggggagcccgctgaggtcacgaccacggtgctggtgaggagagatcaccatggagccaatttctcgtgccgcactgaactggacctgcggccccaagggctggagctgtttgagaacacctcggccccctaccagctccagacctttgtcctgccagcgactcccccacaacttgtcagcccccgggtcctagaggtggacacgcaggggaccgtggtctgttccctggacgggctgttcccagtctcggaggcccaggtccacctggcactgggggaccagaggttgaaccccacagtcacctatggcaacgactccttctcggccaaggcctcagtcagtgtgaccgcagaggacgagggcacccagcggctgacgtgtgcagtaatactggggaaccagagccaggagacactgcagacagtgaccatctacagctttccggcgcccaacgtgattctgacgaagccagaggtctcagaagggaccgaggtgacagtgaagtgtgaggcccaccctagagccaaggtgacgctgaatggggttccagcccagccactgggcccgagggcccagctcctgctgaaggccaccccagaggacaacgggcgcagcttctcctgctctgcaaccctggaggtggccggccagcttatacacaagaaccagacccgggagcttcgtgtcctgtatggcccccgactggacgagagggattgtccgggaaactggacgtggccagaaaattcccagcagactccaatgtgccaggcttgggggaacccattgcccgagctcaagtgtctaaaggatggcactttcccactgcccatcggggaatcagtgactgtcactcgagatcttgagggcacctacctctgtcgggccaggagcactcaaggggaggtcacccgcgaggtgaccgtgaatgtgctctccccccggtatgagattgtcatcatcactgtggtagcagccgcagtcataatgggcactgcaggcctcagcacgtacctctataaccgccagcggaagatcaagaaatacagactacaacaggcccaaaaagggacccccatgaaaccgaacacacaagccacgcctccctgaacctatcccgggacagggcctcttcctcggccttcccatattggtggcagtggtgccacactgaacagagtggaagacatatgccatgcagctacacctaccggccctgggacgccggaggacagggcattgtcctcagtcagatacaacagcatttggggccatggtacctgcacacctaaaacactaggccacgcatctgatctgtagtcacatgactaagccaagaggaaggagcaagactcaagacatgattgatggatgttaaagtctagcctgatgagaggggaagtggtgggggagacatagccccaccatgaggacatacaactgggaaatactgaaacttgctgcctattgggtatgctgaggcccacagacttacagaagaagtggccctccatagacatgtgtagcatcaaaacacaaaggcccacacttcctgacggatgccagcttgggcactgctgtctactgaccccaacccttgatgatatgtatttattcatttgttattttaccagctatttattgagtgtcttttatgtaggctaaatgaacataggtctctggcctcacggagctcccagtccatgtcacattcaaggtcaccaggtacagttgtacaggttgtacactgcaggagagtgcctggcaaaaagatcaaatggggctgggacttctcattggccaacctgcctttccccagaaggagtgatttttctatcggcacaaaagcactatatggactggtaatggttcacaggttcagagattacccagtgaggccttattcctcccttccccccaaaactgacacctttgttagccacctccccacccacatacatttctgccagtgttcacaatgacactcagcggtcatgtctggacatgagtgcccagggaatatgcccaagctatgccttgtcctcttgtcctgtttgcatttcactgggagcttgcactattgcagctccagtttcctgcagtgatcagggtcctgcaagcagtggggaagggggccaaggtattggaggactccctcccagctttggaagggtcatccgcgtgtgtgtgtgtgtgtatgtgtagacaagctctcgctctgtcacccaggctggagtgcagtggtgcaatcatggttcactgcagtcttgaccttttgggctcaagtgatcctcccacctcagcctcctgagtagctgggaccataggctcacaacaccacacctggcaaatttgattttttttttttttttcagagacggggtctcgcaacattgcccagacttcctttgtgttagttaataaagctttctcaactgcc

SEQ ID NO: 329 - DNA, 1051 bp, Homo sapiens
ggaccgccgcctggttaaaggcgcttatttcccaggcagccgctgcagtcgccacacctttgcccctgctgcgatgaccctgtcgccacttctgctgttcctgccaccgctgctgctgctgctggacgtccccacggcggcggtgcaggcgtcccctctgcaagcgttagacttctttgggaatgggccaccagttaactacaagacaggcaatctatacctgcgggggcccctgaagaagtccaatgcaccgcttgtcaatgtgaccctctactatgaagcactgtgcggtggctgccgagccttcctgatccgggagctcttcccaacatggctgttggtcatggagatcctcaatgtcacgctggtgccctacggaaacgcacaggaacaaaatgtcagtggcaggtgggagttcaagtgccagcatggagaagaggagtgcaaattcaacaaggtggaggcctgcgtgttggatgaacttgacatggagctagccttcctgaccattgtctgcatggaagagtttgaggacatggagagaagtctgccactatgcctgcagctctacgccccagggctgtcgccagacactatcatggagtgtgcaatgggggaccgcggcatgcagctcatgcacgccaacgcccagcggacagatgctctccagccaccacacgagtatgtgccctgggtcaccgtcaatgggaaacccttggaagatcagacccagctccttacccttgtctgccagttgtaccagggcaagaagccggatgtctgcccttcctcaaccagctccctcaggagtgtttgcttcaagtgatggccggtgagctgcggagagctcatggaaggcgagtgggaacccggctgcctgcctttttttctgatccagaccctcggcacctgctacttaccaactggaaaattttatgcatcccatgaagcccagatacacaaaattccaccccatgatcaagaatcctgctccactaagaatggtgctaaagtaaaactagtttaataagcaaaaaaaaaaaaaaaaaaa

SEQ ID NO: 330 - DNA, 1124 bp, Homo sapiens
gccgctgccaccgcaccccgccatggagcggccgtcgctgcgcgccctgctcctcggcgccgctgggctgctgctcctgctcctgcccctctcctcttcctcctcttcggacacctgcggcccctgcgagccggcctcctgcccgcccctgcccccgctgggctgcctgctgggcgagacccgcgacgcgtgcggctgctgccctatgtgcgcccgcggcgagggcgagccgtgcgggggtggcggcgccggcagggggtactgcgcgccgggcatggagtgcgtgaagagccgcaagaggcggaagggtaaagccggggcagcagccggcggtccgggtgtaagcggcgtgtgcgtgtgcaagagccgctacccggtgtgcggcagcgacggcaccacctacccgagcggctgccagctgcgcgccgccagccagagggccgagagccgcggggagaaggccatcacccaggtcagcaagggcacctgcgagcaaggtccttccatagtgacgccccccaaggacatctggaatgtcactggtgcccaggtgtacttgagctgtgaggtcatcggaatcccgacacctgtcctcatctggaacaaggtaaaaaggggtcactatggagttcaaaggacagaactcctgcctggtgaccgggacaacctggccattcagacccggggtggcccagaaaagcatgaagtaactggctgggtgctggtatctcctctaagtaaggaagatgctggagaatatgagtgccatgcatccaattcccaaggacaggcttcagcatcagcaaaaattacagtggttgatgccttacatgaaataccagtgaaaaaaggtgaaggtgccgagctataaacctccagaatattattagtctgcatggttaaaagtagtcatggataactacattacctgttcttgcctaataagtttcttttaatccaatccactaacactttagttatattcactggttttacacagagaaatacaaaataaagatcacacatcaagactatctacaaaaatttattatatatttacagaagaaaagcatgcatatcattaaacaaataaaatactttttatcacaaaaaaaaaaaaaaaa

SEQ ID NO: 331 - DNA, 1058 bp, Homo sapiens
aagccaactttcctttcaaatacacaccccaacccgccccggcatacacagaaatggggactgcgagcagaagcaacatcgctcgccatctgcaaaccaatctcattctattttgtgtcggtgctgtgggcgcctgtactctctctgtcacacaaccgtggtacctagaagtggactacactcatgaggccgtcaccataaagtgtaccttctccgcaaccggatgcccttctgagcaaccaacatgcctgtggtttcgctacggtgctcaccagcctgagaacctgtgcttggacgggtgcaaaagtgaggcagacaagttcacagtgagggaggccctcaaagaaaaccaagtttccctcactgtaaacagagtgacttcaaatgacagtgcaatttacatctgtggaatagcattccccagtgtgccggaagcgagagctaaacagacaggaggagggaccacactggtggtaagagaaattaagctgctcagcaaggaactgcggagcttcctgacagctcttgtatcactgctctctgtctatgtgaccggtgtgtgcgtggccttcatactcctctccaaatcaaaatccaaccctctaagaaacaaagaaataaaagaagactcacaaaagaagaagagtgctcggcgtatttttcaggaaattgctcaagaactataccataagagacatgtggaaacaaatcagcaatctgagaaagataacaacacttatgaaaacagaagagtactttccaactatgaaaggccatagaaacgttttaattttcaatgaagtcactgaaaatccaactccaggagctatggcagtgttaatgaacatatatcatcaggtcttaaaaaaaaataaaggtaaactgaaaagacaactggctacaaagaaggatgtcagaatgtaaggaaactataactaatagtcattaccaaaatactaaaacccaacaaaatgcaactgaaaaataccttccaaatttgccaagaaaaaaaattctattttaaacttaaaaaaaaaaaaaaaaaaaaaaaaaaaaaa

SEQ ID NO: 332 - DNA, 3649 bp, Homo sapiens; identical to SEQ ID NO: 78

SEQ ID NO: 333 - DNA, 1881 bp, Homo sapiens
ggtggctgaacctcgcaggtggcagagaggctcccctggggctgtggggctctacgtggatccgatggagccgctggtgacctgggtggtccccctcctcttcctcttcctgctgtccaggcagggcgctgcctgcagaaccagtgagtgctgttttcaggacccgccatatccggatgcagactcaggctcggcctcgggccctagggacctgagatgctatcggatatccagtgatcgttacgagtgctcctggcagtatgagggtcccacagctggggtcagccacttcctgcggtgttgccttagctccgggcgctgctgctacttcgccgccggctcagccaccaggctgcagttctccgaccaggctggggtgtctgtgctgtacactgtcacactctgggtggaatcctgggccaggaaccagacagagaagtctcctgaggtgaccctgcagctctacaactcagttaaatatgagcctcctctgggagacatcaaggtgtccaagttggccgggcagctgcgtatggagtgggagaccccggataaccaggttggtgctgaggtgcagttccggcaccggacacccagcagcccatggaagttgggcgactgcggacctcaggatgatgatactgagtcctgcctctgccccctggagatgaatgtggcccaggaattccagctccgacgacggcagctggggagccaaggaagttcctggagcaagtggagcagccccgtgtgcgttccccctgaaaaccccccacagcctcaggtgagattctcggtggagcagctgggccaggatgggaggaggcggctgaccctgaaagagcagccaacccagctggagcttccagaaggctgtcaagggctggcgcctggcacggaggtcacttaccgactacagctccacatgctgtcctgcccgtgtaaggccaaggccaccaggaccctgcacctggggaagatgccctatctctcgggtgctgcctacaacgtggctgtcatctcctcgaaccaatttggtcctggcctgaaccagacgtggcacattcctgccgacacccacacagatggcatgatctcagctcactgcaacctccgccttccagattcaagagattctcctgcttcagcctcccgagtagctgggattacaggcatctgccaccatacccggctaattttgtatttttagtagagacggggtttcaccacgttggccaggctggtctcgaactcctgacctcaagtgatccacctgccttggcctcccaaagtgttgggattataggcgtgagccaccatgcccagcctaatttttgtatttttagtagagatggagtttcaccatgttgcccaggctggtctcaaactcctgccctcaggtgatccacccacctcagcctctcaaagtgctgggattacaggtgtgagccactgtggccgacctactatttttattatttttgagctaggttctcagtctgttggcagactggagtgcaatcatggctcactgcagccttgaactcccagactcaagtgatccttccacctcagcctctggagtagctgggactacagacatgcaccaccacacctggttaattttttatttttattttttgtagagacaggtgtctctctacgttgcccaggctggtctcgaactcctgggctcaagtgatccacccatctccacctcccaaagtgctaggattacaggcgtgagccaccgtacccagcctggtcccatatcatagtgaaatggtgcctgtaaagctctcagcattggcttggcacatgcagttggtactcaataaacggctgttgctatccccaaaaaaaaaaaaaaaaaaaaaaaaa

SEQ ID NO: 334 - DNA, 1498 bp, Homo sapiens
accaaacctcttcgaggcacaaggcacaacaggctgctctgggattctcttcagccaatcttcattgctcaagtgtctgaagcagccatggcagaagtacctgagctcgccagtgaaatgatggcttattacagtggcaatgaggatgacttgttctttgaagctgatggccctaaacagatgaagtgctccttccaggacctggacctctgccctctggatggcggcatccagctacgaatctccgaccaccactacagcaagggcttcaggcaggccgcgtcagttgttgtggccatggacaagctgaggaagatgctggttccctgcccacagaccttccaggagaatgacctgagcaccttctttcccttcatctttgaagaagaacctatcttcttcgacacatgggataacgaggcttatgtgcacgatgcacctgtacgatcactgaactgcacgctccgggactcacagcaaaaaagcttggtgatgtctggtccatatgaactgaaagctctccacctccagggacaggatatggagcaacaagtggtgttctccatgtcctttgtacaaggagaagaaagtaatgacaaaatacctgtggccttgggcctcaaggaaaagaatctgtacctgtcctgcgtgttgaaagatgataagcccactctacagctggagagtgtagatcccaaaaattacccaaagaagaagatggaaaagcgatttgtcttcaacaagatagaaatcaataacaagctggaatttgagtctgcccagttccccaactggtacatcagcacctctcaagcagaaaacatgcccgtcttcctgggagggaccaaaggcggccaggatataactgacttcaccatgcaatttgtgtcttcctaaagagagctgtacccagagagtcctgtgctgaatgtggactcaatccctagggctggcagaaagggaacagaaaggtttttgagtacggctatagcctggactttcctgttgtctacaccaatgcccaactgcctgccttagggtagtgctaagaggatctcctgtccatcagccaggacagtcagctctctcctttcagggccaatccccagcccttttgttgagccaggcctctctcacctctcctactcacttaaagcccgcctgacagaaaccacggccacatttggttctaagaaaccctctgtcattcgctcccacattctgatgagcaaccgcttccctatttatttatttatttgtttgtttgttttattcattggtctaatttattcaaagggggcaagaagtagcagtgtctgtaaaagagcctagtttttaatagctatggaatcaattcaatttggactggtgtgctctctttaaatcaagtcctttaattaagactgaaaatatataagctcagattatttaaatgggaatatttataaatgagcaaatatcatactgttcaatggttctgaaataaacttcactgaag

SEQ ID NO: 335 - DNA, 4045 bp, Homo sapiens
gcagccagagctcagcagggccctggagagatggccacggtcccagcaccggggaggactggagagcgcgcgctgccaccgccccatgtctcagccagggcttccttcctcggctccaccctgtggatgtaatggcggcccctgctctgtcctggcgtctgcccctcctcatcctcctcctgcccctggctacctcttgggcatctgcagcggtgaatggcacttcccagttcacatgcttctacaactcgagagccaacatctcctgtgtctggagccaagatggggctctgcaggacacttcctgccaagtccatgcctggccggacagacggcggtggaaccaaacctgtgagctgctccccgtgagtcaagcatcctgggcctgcaacctgatcctcggagccccagattctcagaaactgaccacagttgacatcgtcaccctgagggtgctgtgccgtgagggggtgcgatggagggtgatggccatccaggacttcaagccctttgagaaccttcgcctgatggcccccatctccctccaagttgtccacgtggagacccacagatgcaacataagctgggaaatctcccaagcctcccactactttgaaagacacctggagttcgaggcccggacgctgtccccaggccacacctgggaggaggcccccctgctgactctcaagcagaagcaggaatggatctgcctggagacgctcaccccagacacccagtatgagtttcaggtgcgggtcaagcctctgcaaggcgagttcacgacctggagcccctggagccagcccctggccttcaggacaaagcctgcagcccttgggaaggacaccattccgtggctcggccacctcctcgtgggcctcagcggggcttttggcttcatcatcttagtgtacttgctgatcaactgcaggaacaccgggccatggctgaagaaggtcctgaagtgtaacaccccagacccctcgaagttcttttcccagctgagctcagagcatggaggagacgtccagaagtggctctcttcgcccttcccctcatcgtccttcagccctggcggcctggcacctgagatctcgccactagaagtgctggagagggacaaggtgacgcagctgctcctgcagcaggacaaggtgcctgagcccgcatccttaagcagcaaccactcgctgaccagctgcttcaccaaccagggttacttcttcttccacctcccggatgccttggagatagaggcctgccaggtgtactttacttacgacccctactcagaggaagaccctgatgagggtgtggccggggcacccacagggtcttccccccaacccctgcagcctctgtcaggggaggacgacgcctactgcaccttcccctccagggatgacctgctgctcttctcccccagtctcctcggtggccccagccccccaagcactgcccctgggggcagtggggccggtgaagagaggatgcccccttctttgcaagaaagagtccccagagactgggacccccagcccctggggcctcccaccccaggagtcccagacctggtggattttcagccaccccctgagctggtgctgcgagaggctggggaggaggtccctgacgctggccccagggagggagtcagtttcccctggtccaggcctcctgggcagggggagttcagggcccttaatgctcgcctgcccctgaacactgatgcctacttgtccctccaagaactccagggtcaggacccaactcacttggtgtagacagatggccagggtgggaggcaggcagctgcctgctctgcgccgagcctcagaaggaccctgttgagggtcctcagtccactgctgaggacactcagtgtccagttgcagctggacttctccacccggatggcccccacccagtcctgcacacttggtccatccatttccaaacctccactgctgctcccgggtcctgctgcccgagccaggaactgtgtgtgttgcaggggggcagtaactccccaactccctcgttaatcacaggatcccacgaatttaggctcagaagcatcgctcctctccagccctgcagctattcaccaatatcagtcctcgcggctctccagggctccctgccctgacctcttccctgggttttctgccccagcctcctccttccctcccctccccgtccacagggcagcctgagcgtgctttccaaaacccaaatatggccacgctccccctcggttcaaaaccttgcacaggtcccactgccctcagccccacttctcagcctggtacttgtacctccggtgtcgtgtggggacatccccttctgcaatcctccctaccgtcctcctgagccactcagagctccctcacaccccctctgttgcacatgctattccctggggctgctgtgcgctccccctcatctaggtgacaaacttccctgactcttcaagtgccggttttgcttctcctggagggaagcactgcctcccttaatctgccagaaacttctagcgtcagtgctggagggagaagctgtcagggacccagggcgcctggagaaagaggccctgttactattcctttgggatctctgaggcctcagagtgcttggctgctgtatctttaatgctggggcccaagtaagggcacagatccccccacaaagtggatgcctgctgcatcttcccacagtggcttcacagacccacaagagaagctgatggggagtaaaccctggagtccgaggcccaggcagcagccccgcctagtggtgggccctgatgctgccaggcctgggacctcccactgccccctccactggaggggtctcctctgcagctcagggactggcacactggcctccagaagggcagctccacagggcagggcctcattatttttcactgccccagacacagtgcccaacaccccgtcgtataccctggatgaacgaattaattacctggcaccacctcgtctgggctccctgcgcctgacattcacacagagaggcagagtcccgtgcccattaggtctggcatgccccctcctgcaaggggctcaaccccctaccccgacccctccacgtatctttcctaggcagatcacgttgcaatggctcaaacaacattccaccccagcaggacagtgaccccagtcccagctaactctgacctgggagccctcaggcacctgcacttacaggccttgctcacagctgattgggcacctgaccacacgcccccacaggctctgaccagcagcctatgagggggtttggcaccaagctctgtccaatcaggtaggctgggcctgaactagccaatcagatcaactctgtcttgggcgtttgaactcagggagggaggcccttgggagcaggtgcttgtggacaaggctccacaagcgttgagccttggaaaggtagacaagcgttgagccactaagcagaggaccttgggttcccaatacaaaaatacctactgctgagagggctgctgaccatttggtcaggattcctgttgcctttatatccaaaataaactcccctttcttgaggttgtctgagtcttgggtctatgccttgaaaaaagctgaattattggacagtctcacctcctgccatagggtcctgaatgtttcagaccacaaggggctccacacctttgctgtgtgttctggggcaacctactaatcctctctgcaagtcggtctccttatccccccaaatggaaattgtatttgccttctccactttgggaggctcccacttcttgggagggttacattttttaagtcttaatcatttgtgacatatgtatctatacatccgtatcttttaatgatccgtgtgtaccatctttgtgattatttccttaatattttttctttaagtcagttcattttcgttgaaatacatttatttaaagaaaaatctttgttactctgtaaatgaaaaaacccattttcgctataaataaaaggtaactgtacaaaataagtacaatgcaacaaaa

SEQ ID NO: 336 - DNA, 1666 bp, Homo sapiens
ctccataaggcacaaactttcagagacagcagagcacacaagcttctaggacaagagccaggaagaaaccaccggaaggaaccatctcactgtgtgtaaacatgacttccaagctggccgtggctctcttggcagccttcctgatttctgcagctctgtgtgaaggtgcagttttgccaaggagtgctaaagaacttagatgtcagtgcataaagacatactccaaacctttccaccccaaatttatcaaagaactgagagtgattgagagtggaccacactgcgccaacacagaaattattgtaaagctttctgatggaagagagctctgtctggaccccaaggaaaactgggtgcagagggttgtggagaagtttttgaagagggctgagaattcataaaaaaattcattctctgtggtatccaagaatcagtgaagatgccagtgaaacttcaagcaaatctacttcaacacttcatgtattgtgtgggtctgttgtagggttgccagatgcaatacaagattcctggttaaatttgaatttcagtaaacaatgaatagtttttcattgtaccatgaaatatccagaacatacttatatgtaaagtattatttatttgaatctacaaaaaacaacaaataatttttaaatataaggattttcctagatattgcacgggagaatatacaaatagcaaaattgaggccaagggccaagagaatatccgaactttaatttcaggaattgaatgggtttgctagaatgtgatatttgaagcatcacataaaaatgatgggacaataaattttgccataaagtcaaatttagctggaaatcctggatttttttctgttaaatctggcaaccctagtctgctagccaggatccacaagtccttgttccactgtgccttggtttctcctttatttctaagtggaaaaagtattagccaccatcttacctcacagtgatgttgtgaggacatgtggaagcactttaagttttttcatcataacataaattattttcaagtgtaacttattaacctatttattatttatgtatttatttaagcatcaaatatttgtgcaagaatttggaaaaatagaagatgaatcattgattgaatagttataaagatgttatagtaaatttattttattttagatattaaatgatgttttattagataaatttcaatcagggtttttagattaaacaaacaaacaattgggtacccagttaaattttcatttcagataaacaacaaataattttttagtataagtacattattgtttatctgaaattttaattgaactaacaatcctagtttgatactcccagtcttgtcattgccagctgtgttggtagtgctgtgttgaattacggaataatgagttagaactattaaaacagccaaaactccacagtcaatattagtaatttcttgctggttgaaacttgtttattatgtacaaatagattcttataatattatttaaatgactgcatttttaaatacaaggctttatatttttaactttaagatgtttttatgtgctctccaaattttttttactgtttctgattgtatggaaatataaaagtaaatatgaaacatttaaaatataatttgttgtcaaagtaaaaaaaaaaaaaaa

SEQ ID NO: 337 - DNA, 2859 bp, Homo sapiens
cattcagagacagaaggtggatagacaaatctccaccttcagactggtaggctcctccagaagccatcagacaggaagatgtgaaaatccccagcactcatcccagaatcactaagtggcacctgtcctgggccaaagtcccaggacagacctcattgttcctctgtgggaatacctccccaggagggcatcctggatttcccccttgcaacccaggtcagaagtttcatcgtcaaggttgtttcatcttttttttcctgtctaacagctctgactaccacccaaccttgaggcacagtgaagacatcggtggccactccaataacagcaggtcacagctgctcttctggaggtgtcctacaggtgaaaagcccagcgacccagtcaggatttaagtttacctcaaaaatggaagattttaacatggagagtgacagctttgaagatttctggaaaggtgaagatcttagtaattacagttacagctctaccctgcccccttttctactagatgccgccccatgtgaaccagaatccctggaaatcaacaagtattttgtggtcattatctatgccctggtattcctgctgagcctgctgggaaactccctcgtgatgctggtcatcttatacagcagggtcggccgctccgtcactgatgtctacctgctgaacctagccttggccgacctactctttgccctgaccttgcccatctgggccgcctccaaggtgaatggctggatttttggcacattcctgtgcaaggtggtctcactcctgaaggaagtcaacttctatagtggcatcctgctactggcctgcatcagtgtggaccgttacctggccattgtccatgccacacgcacactgacccagaagcgctacttggtcaaattcatatgtctcagcatctggggtctgtccttgctcctggccctgcctgtcttacttttccgaaggaccgtctactcatccaatgttagcccagcctgctatgaggacatgggcaacaatacagcaaactggcggatgctgttacggatcctgccccagtcctttggcttcatcgtgccactgctgatcatgctgttctgctacggattcaccctgcgtacgctgtttaaggcccacatggggcagaagcaccgggccatgcgggtcatctttgctgtcgtcctcatcttcctgctctgctggctgccctacaacctggtcctgctggcagacaccctcatgaggacccaggtgatccaggagacctgtgagcgccgcaatcacatcgaccgggctctggatgccaccgagattctgggcatccttcacagctgcctcaaccccctcatctacgccttcattggccagaagtttcgccatggactcctcaagattctagctatacatggcttgatcagcaaggactccctgcccaaagacagcaggccttcctttgttggctcttcttcagggcacacttccactactctctaagacctcctgcctaagtgcagccccgtggggttcctcccttctcttcacagtcacattccaagcctcatgtccactggttcttcttggtctcagtgtcaatgcagcccccattgtggtcacaggaagtagaggaggccacgttcttactagtttcccttgcatggtttagaaagcttgccctggtgcctcaccccttgccataattactatgtcatttgctggagctctgcccatcctgcccctgagcccatggcactctatgttctaagaagtgaaaatctacactccagtgagacagctctgcatactcattaggatggctagtatcaaaagaaagaaaatcaggctggccaacggggtgaaaccctgtctctactaaaaatacaaaaaaaaaaaaaaattagccgggcgtggtggtgagtgcctgtaatcacagctacttgggaggctgagatgggagaatcacttgaacccgggaggcagaggttgcagtgagccgagattgtgcccctgcactccagcctgagcgacagtgagactctgtctcagtccatgaagatgtagaggagaaactggaactctcgagcgttgctgggggggattgtaaaatggtgtgaccactgcagaagacagtatggcagctttcctcaaaacttcagacatagaattaacacatgatcctgcaattccacttataggaattgacccacaagaaatgaaagcagggacttgaacccatatttgtacaccaatattcatagcagcttattcacaagacccaaaaggcagaagcaacccaaatgttcatcaatgaatgaatgaatggctaagcaaaatgtgatatgtacctaacgaagtatccttcagcctgaaagaggaatgaagtactcatacatgttacaacacggacgaaccttgaaaactttatgctaagtgaaataagccagacatcaacagataaatagtttatgattccacctacatgaggtactgagagtgaacaaatttacagagacagaaagcagaacagtgattaccagggactgaggggaggggagcatgggaagtgacggtttaatgggcacagggtttatgtttaggatgttgaaaaagttctgcagataaacagtagtgatagttgtaccgcaatgtgacttaatgccactaaattgacacttaaaaatggtttaaatggtcaattttgttatgtatattttatatcaatttaaaaaaaaacctgagccccaaaaggtattttaatcaccaaggctgattaaaccaaggctagaaccacctgcctatattttttgttaaatgatttcattcaatatcttttttttaataaaccatttttacttgggtgtttat

SEQ ID NO: 338 - DNA, 1572 bp, Homo sapiens
aatttctcactgcccctgtgataaactgtggtcactggctgtggcagcaactattataagatgctctgaaaactcttcagacactgaggggcaccagaggagcagactacaagaatggcacacgctatggaaaactcctggacaatcagtaaagagtaccatattgatgaagaagtgggctttgctctgccaaatccacaggaaaatctacctgatttttataatgactggatgttcattgctaaacatctgcctgatctcatagagtctggccagcttcgagaaagagttgagaagttaaacatgctcagcattgatcatctcacagaccacaagtcacagcgccttgcacgtctagttctgggatgcatcaccatggcatatgtgtggggcaaaggtcatggagatgtccgtaaggtcttgccaagaaatattgctgttccttactgccaactctccaagaaactggaactgcctcctattttggtttatgcagactgtgtcttggcaaactggaagaaaaaggatcctaataagcccctgacttatgagaacatggacgttttgttctcatttcgtgatggagactgcagtaaaggattcttcctggtctctctattggtggaaatagcagctgcttctgcaatcaaagtaattcctactgtattcaaggcaatgcaaatgcaagaacgggacactttgctaaaggcgctgttggaaatagcttcttgcttggagaaagcccttcaagtgtttcaccaaatccacgatcatgtgaacccaaaagcatttttcagtgttcttcgcatatatttgtctggctggaaaggcaacccccagctatcagacggtctggtgtatgaagggttctgggaagacccaaaggagtttgcagggggcagtgcaggccaaagcagcgtctttcagtgctttgacgtcctgctgggcatccagcagactgctggtggaggacatgctgctcagttcctccaggacatgagaagatatatgccaccagctcacaggaacttcctgtgctcattagagtcaaatccctcagtccgtgagtttgtcctttcaaaaggtgatgctggcctgcgggaagcttatgacgcctgtgtgaaagctctggtctccctgaggagctaccatctgcaaatcgtgactaagtacatcctgattcctgcaagccagcagccaaaggagaataagacctctgaagacccttcaaaactggaagccaaaggaactggaggcactgatttaatgaatttcctgaagactgtaagaagtacaactgagaaatcccttttgaaggaaggttaatgtaacccaacaagagcacattttatcatagcagagacatctgtatgcattcctgtcattacccattgtaacagagccacaaactaatactatgcaatgttttaccaataatgcaatacaaaagacctcaaaatacctgtgcatttcttgtaggaaaacaacaaaaggtaattatgtgtaattatactagaagttttgtaatctgtatcttatcattggaataaaatgacattcaataaataaaaa

SEQ ID NO: 339 - DNA, 5065 bp, Homo sapiens
cgctcgatcttgggacccaccgctgccctcagctccgagtccagggcgagtgcagagcacagcgggcggaggaccccgggcgcgggcgcggacggcacgcggggcatgaacctggagggcggcggccgaggcggagagttcggcatgagcgcggtgagctgcggcaacgggaagctccgccagtggctgatcgaccagatcgacagcggcaagtaccccgggctggtgtgggagaacgaggagaagagcatcttccgcatcccctggaagcacgcgggcaagcaggactacaaccgcgaggaggacgccgcgctcttcaaggcttgggcactgtttaaaggaaagttccgagaaggcatcgacaagccggaccctcccacctggaagacgcgcctgcggtgcgctttgaacaagagcaatgactttgaggaactggttgagcggagccagctggacatctcagacccgtacaaagtgtacaggattgttcctgagggagccaaaaaaggagccaagcagctcaccctggaggacccgcagatgtccatgagccacccctacaccatgacaacgccttacccttcgctcccagcccagcaggttcacaactacatgatgccacccctcgaccgaagctggagggactacgtcccggatcagccacacccggaaatcccgtaccaatgtcccatgacgtttggaccccgcggccaccactggcaaggcccagcttgtgaaaatggttgccaggtgacaggaaccttttatgcttgtgccccacctgagtcccaggctcccggagtccccacagagccaagcataaggtctgccgaagccttggcgttctcagactgccggctgcacatctgcctgtactaccgggaaatcctcgtgaaggagctgaccacgtccagccccgagggctgccggatctcccatggacatacgtatgacgccagcaacctggaccaggtcctgttcccctacccagaggacaatggccacaggaaaaacattgagaacctgctgagccacctggagaggggcgtggtcctctggatggcccccgacgggctctatgcgaaaagactgtgccagagcacgatctactgggacgggcccctggcgctgtgcaacgaccggcccaacaaactggagagagaccagacctgcaagctctttgacacacagcagttcttgtcagagctgcaagcgtttgctcaccacggccgctccctgccaagattccaggtgactctatgctttggagaggagtttccagaccctcagaggcaaagaaagctcatcacagctcacgtagaacctctgctagccagacaactatattattttgctcaacaaaacagtggacatttcctgaggggctacgatttaccagaacacatcagcaatccagaagattaccacagatctatccgccattcctctattcaagaatgaaaaatgtcaagatgagtggttttctttttccttttttttttttttttttttgatacggagatacggggtcttgctctgtctcccaggctggagtgcagtgacacaatctcagctcactgtgacctccgcctcctgggttcaagagactctcctgcctcagcctccctggtagctgggattacaggtgtgagccactgcacccacccaagacaagtgattttcattgtaaatatttgactttagtgaaagcgtccaattgactgccctcttactgttttgaggaactcagaagtggagatttcagttcagcggttgaggagaattgcggcgagacaagcatggaaaatcagtgacatctgattggcagatgagcttatttcaaaaggaagggtggctttgcattttcttgtgttctgtagactgccatcattgatgatcactgtgaaaattgaccaagtgatgtgtttacatttactgaaatgcgctctttaatttgttgtagattaggtcttgctggaagacagagaaaacttgcctttcagtattgacactgactagagtgatgactgcttgtaggtatgtctgtgccatttctcagggaagtaagatgtaaattgaagaagcctcacacgtaaaagaaatgtattaatgtatgtaggagctgcagttcttgtggaagacacttgctgagtgaaggaaatgaatctttgactgaagccgtgcctgtagccttggggaggcccatcccccacctgccagcggtttcctggtgtgggtccctctgccccaccctccttcccattggctttctctccttggcctttcctggaagccagttagtaaacttcctattttcttgagtcaaaaaacatgagcgctactcttggatgggacatttttgtctgtcctacaatctagtaatgtctaagtaatggttaagttttcttgtttctgcatctttttgaccctcattctttagagatgctaaaattcttcgcataaagaagaagaaattaaggaacataaatcttaatacttgaactgttgcccttctgtccaagtacttaactatctgttcccttcctctgtgccacgctcctctgtttgtttggctgtccagcgatcagccatggcgacactaaaggaggaggagccggggactcccaggctggagagcactgccaggacccaccactggaagcaggatggagctgactacggaactgcacactcagtgggctgtttctgcttatttcatctgttctatgcttcctcgtgccaattatagtttgacagggccttaaaattacttggctttttccaaatgcttctatttatagaaatcccaaagacctccacttgcttaagtatacctatcacttacatttttgtggttttgagaaagtacagcagtagactggggcgtcacctccaggccgtttctcatactacaggatatttactattactcccaggattcagcagaagattgcgttagctctcaaatgtgtgttcctgcttttctaatggatattttaaattcattcaacaagcacctagtaagtgcctgctgtatccctacattacacagttcagcctttatcaagcttagtgagcagtgagcactgaaacattattttttaatgtttaaaaagtttctaatattaaagtcagaatattaatacaattaatattaatattaactacagaaaagacaaacagtagagaacagcaaaaaaataaaaaggatctccttttttcccagcccaaattctcctctctaaaagtgtccacaagaaggggtgtttattcttccaacacatttcacttttctgtaaatatacataaacttaaaaagaaaacctcatggagtcatcttgcacacacttttcatgcagtgctctttgtagctaaacagtgaagatttacctcgttctgctcagaggccttgctgtggagctccactgccatgtacccagtagggtttgacatttcattagccatgcaacatggatatgtattgggcagcagactgtgtttcgtgaactgcagtgatgtatacatcttatagatgcaaagtattttggggtatattatcctaagggaagataaagatgatattaagaactgctgtttcacggggcccttacctgtgaccctctttgctgaagaatatttaaccccacacagcacttcaaagaagctgtcttggaagtctgtctcaggagcaccctgtcttcttaattctccaagcggatgctccatttcaattgctttgtgacttcttcttctttgtttttttaaatattatgctgctttaacagtggagctgaattttctggaaaatgcttcttggctggggccactacctcctttcctatctttacatctatgtgtatgttgactttttaaaattctgagtgatccagggtatgacctagggaatgaactagctatggaaataactcagggttaggaatcctagcacttgtctcaggactctgaaaaggaacggcttcctcattccttgtcttgataaagtggaattggcaaactagaatttagtttgtactcagtggacagtgctgttgaagatttgaggacttgttaaagagcactgggtcatatggaaaaaatgtatgtgtctccccaggtgcattttcttggtttatgtcttgttcttgagattttgtatatttaggaaaacctcaagcagtaattaatatctcctggaacactatagagaaccaagtgaccgactcatttacaactgaaacctaggaagcccctgagtcctgagcgaaaacaggagagttagtcgccctacagaaaacccagctagactattgggtatgaactaaaaagagactgtgccatggtgagaaaaatgtaaaatcctacagtggaatgagcagcccttacagtgttgttaccaccaagggcaggtaggtattagtgtttgaaaaagctggtctttgagcgagggcataaatacagctagccccaggggtggaacaactgtgggagtcttgggtactcgcacctcttggctttgttgatgctccgccaggaaggccacttgtgtgtgcgtgtcagttacttttttagtaacaattcagatccagtgtaaacttccgttcattgctctccagtcacatgcccccacttccccacaggtgaaagtttttctgaagtgttgggattggttaaggtctttatttgtattacgtatctccccaagtcctctgtggccagctgcatctgtctgaatggtgcgtgaaggctctcagaccttacacaccattttgtaagttatgttttacatgccccgtttttgagactgatctcgatgcaggtggatctccttgagatcctgatagcctgttacaggaatgaagtaaaggtcagttttttttgtattgattttcacagctttgaggaacatgcataagaaatgtagctgaagtagaggggacgtgagagaagggccaggccggcaggccaaccctcctccaatggaaattcccgtgttgcttcaaactgagacagatgggacttaacaggcaatggggtccacttccccctcttcagcatcccccgtacc

SEQ ID NO: 340 - DNA, 5828 bp, Homo sapiens
cggcggcgcggtcggagggggccggcgcgcagagccagacgccgccgcttgttttggttggggctctcggcaactctccgaggaggaggaggaggagggaggaggggagaagtaactgcagcggcagcgccctcccgaggaacaggcgtcttccccgaacccttcccaaacctcccccatcccctctcgcccttgtcccctcccctcctccccagccgcctggagcgaggggcagggatgagtctgtccctccggccggtccccagctgcagtggctgcccggtatcgtttcgcatggaaaagccactttctccacccgccgagatgggcccggatggggctgcagaggacgcgcccgcgggcggcggcagcagcagcagcagcagcagcagcaacagcaacagccgcagcgccgcggtctctgcgactgagctggtatttgggcggctggtggcggctgggacggttggggggtgggaggaggcgaaggaggagggagaaccccgtgcaacgttgggacttggcaacccgcctccccctgcccaaggatatttaatttgcctcgggaatcgctgcttccagaggggaactcaggagggaaggcgcgcgcgcgcgcgcgctcctggaggggcaccgcagggacccccgactgtcgcctccctgtgccggactccagccggggcgacgagagatgcatcttcgctccttcctggtggcggcggcggctgagaggagacttggctctcggaggatcggggctgccctcaccccggacgcactgcctccccgccggcgtgaagcgcccgaaaactccggtcgggctctctcctgggctcagcagctgcgtcctccttcagctgcccctccccggcgcggggggcggcgtggatttcagagtcggggtttctgctgcctccagccctgtttgcatgtgccgggccgcggcgaggagcctccgccccccacccggttgtttttcggagcctccctctgctcagcgttggtggtggcggtggcagcatggcgagccctccggagagcgatggcttctcggacgtgcgcaaggtgggctacctgcgcaaacccaagagcatgcacaaacgcttcttcgtactgcgcgcggccagcgaggctgggggcccggcgcgcctcgagtactacgagaacgagaagaagtggcggcacaagtcgagcgcccccaaacgctcgatcccccttgagagctgcttcaacatcaacaagcgggctgactccaagaacaagcacctggtggctctctacacccgggacgagcactttgccatcgcggcggacagcgaggccgagcaagacagctggtaccaggctctcctacagctgcacaaccgtgctaagggccaccacgacggagctgcggccctcggggcgggaggtggtgggggcagctgcagcggcagctccggccttggtgaggctggggaggacttgagctacggtgacgtgcccccaggacccgcattcaaagaggtctggcaagtgatcctgaagcccaagggcctgggtcagacaaagaacctgattggtatctaccgcctttgcctgaccagcaagaccatcagcttcgtgaagctgaactcggaggcagcggccgtggtgctgcagctgatgaacatcaggcgctgtggccactcggaaaacttcttcttcatcgaggtgggccgttctgccgtgacggggcccggggagttctggatgcaggtggatgactctgtggtggcccagaacatgcacgagaccatcctggaggccatgcgggccatgagtgatgagttccgccctcgcagcaagagccagtcctcgtccaactgctctaaccccatcagcgtccccctgcgccggcaccatctcaacaatcccccgcccagccaggtggggctgacccgccgatcacgcactgagagcatcaccgccacctccccggccagcatggtgggcgggaagccaggctccttccgtgtccgcgcctccagtgacggcgaaggcaccatgtcccgcccagcctcggtggacggcagccctgtgagtcccagcaccaacagaacccacgcccaccggcatcggggcagcgcccggctgcaccccccgctcaaccacagccgctccatccccatgccggcttcccgctgctcgccttcggccaccagcccggtcagtctgtcgtccagtagcaccagtggccatggctccacctcggattgtctcttcccacggcgatctagtgcttcggtgtctggttcccccagcgatggcggtttcatctcctcggatgagtatggctccagtccctgcgatttccggagttccttccgcagtgtcactccggattccctgggccacaccccaccagcccgcggtgaggaggagctaagcaactatatctgcatgggtggcaaggggccctccaccctgaccgcccccaacggtcactacattttgtctcggggtggcaatggccaccgctgcaccccaggaacaggcttgggcacgagtccagccttggctggggatgaagcagccagtgctgcagatctggataatcggttccgaaagagaactcactcggcaggcacatcccctaccattacccaccagaagaccccgtcccagtcctcagtggcttccattgaggagtacacagagatgatgcctgcctacccaccaggaggtggcagtggaggccgactgccgggacacaggcactccgccttcgtgcccacccgctcctacccagaggagggtctggaaatgcaccccttggagcgtcggggggggcaccaccgcccagacagctccaccctccacacggatgatggctacatgcccatgtccccaggggtggccccagtgcccagtggccgaaagggcagtggagactatatgcccatgagccccaagagcgtatctgccccacagcagatcatcaatcccatcagacgccatccccagagagtggaccccaatggctacatgatgatgtcccccagcggtggctgctctcctgacattggaggtggccccagcagcagcagcagcagcagcaacgccgtcccttccgggaccagctatggaaagctgtggacaaacggggtagggggccaccactctcatgtcttgcctcaccccaaacccccagtggagagcagcggtggtaagctcttaccttgcacaggtgactacatgaacatgtcaccagtgggggactccaacaccagcagcccctccgactgctactacggccctgaggacccccagcacaagccagtcctctcctactactcattgccaagatcctttaagcacacccagcgccccggggagccggaggagggtgcccggcatcagcacctccgcctttccactagctctggtcgccttctctatgctgcaacagcagatgattcttcctcttccaccagcagcgacagcctgggtgggggatactgcggggctaggctggagcccagccttccacatccccaccatcaggttctgcagccccatctgcctcgaaaggtggacacagctgctcagaccaatagccgcctggcccggcccacgaggctgtccctgggggatcccaaggccagcaccttacctcgggcccgagagcagcagcagcagcagcagcccttgctgcaccctccagagcccaagagcccgggggaatatgtcaatattgaatttgggagtgatcagtctggctacttgtctggcccggtggctttccacagctcaccttctgtcaggtgtccatcccagctccagccagctcccagagaggaagagactggcactgaggagtacatgaagatggacctggggccgggccggagggcagcctggcaggagagcactggggtcgagatgggcagactgggccctgcacctcccggggctgctagcatttgcaggcctacccgggcagtgcccagcagccggggtgactacatgaccatgcagatgagttgtccccgtcagagctacgtggacacctcgccagctgcccctgtaagctatgctgacatgcgaacaggcattgctgcagaggaggtgagcctgcccagggccaccatggctgctgcctcctcatcctcagcagcctctgcttccccgactgggcctcaaggggcagcagagctggctgcccactcgtccctgctggggggcccacaaggacctgggggcatgagcgccttcacccgggtgaacctcagtcctaaccgcaaccagagtgccaaagtgatccgtgcagacccacaagggtgccggcggaggcatagctccgagactttctcctcaacacccagtgccacccgggtgggcaacacagtgccctttggagcgggggcagcagtagggggcggtggcggtagcagcagcagcagcgaggatgtgaaacgccacagctctgcttcctttgagaatgtgtggctgaggcctggggagcttgggggagcccccaaggagccagccaaactgtgtggggctgctgggggtttggagaatggtcttaactacatagacctggatttggtcaaggacttcaaacagtgccctcaggagtgcacccctgaaccgcagcctcccccacccccaccccctcatcaacccctgggcagcggtgagagcagctccacccgccgctcaagtgaggatttaagcgcctatgccagcatcagtttccagaagcagccagaggaccgtcagtagctcaactggacatcacagcagaatgaagacctaaatgacctcagcaaatcctcttctaactcatgggtacccagactctaaatatttcatgattcacaactaggacctcatatcttcctcatcagtagatggtacgatgcatccatttcagtttgtttactttatccaatcctcaggatttcattgactgaactgcacgttctatattgtgccaagcgaaaaaaaaaaatgcactgtgacaccagaataatgagtctgcataaacttcatcttcaaccttaaggacttagctggccacagtgagctgatgtgcccaccaccgtgtcatgagagaatgggtttactctcaatgcattttcaagatacatttcatctgctgctgaaactgtgtacgacaaagcatcattgtaaattatttcatacaaaactgttcacgttgggtggagagagtattaaatatttaacataggttttgatttatatgtgtaattttttaaatgaaaatgtaacttttcttacagcacatcttttttttggatgtgggatggaggtatacaatgttctgttgtaaagagtggagcaaatgcttaaaacaaggcttaaaagagtagaatagggtatgatccttgttttaagattgtaattcagaaaacataatataagaatcatagtgccatagatggttctcaattgtatagttatatttgctgatactatctcttgtcatataaacctgatgttgagctgagttccttataagaattaatcttaattttgtattttttcctgtaagacaataggccatgttaattaaactgaagaaggatatatttggctgggtgttttcaaatgtcagcttaaaattggtaattgaatggaagcaaaattataagaagaggaaattaaagtcttccattgcatgtattgtaaacagaaggagatgggtgattccttcaattcaaaagctctctttggaatgaacaatgtgggcgtttgtaaattctggaaatgtctttctattcataataaactagatactgttgatcttttaaaaaaaaaaaaaaaaaaaaaaaaaaaaa

SEQ ID NO: 341 - DNA, 2729 bp, Homo sapiens
gaaggaagaggaagaggaggagagggaggccagagccagaacagcccggcagcccgagcttcgggggagaacggcctgagccccgagcaagttgcctcgggagccctaatcctctcccgctggctcgccgagcggtcagtggcgctcagcggcggcgaggctgaaatatgataatcagaacagctgcgccgcgcgccctgcagccaatgggcgcggcgctcgcctgacgtccccgcgcgctgcgtcagaccaatggcgatggagctgagttggagcagagaagtttgagtaagagataaggaagagaggtgcccgagccgcgccgagtctgccgccgccgcagcgcctccgctccgccaactccgccggcttaaattggactcctagatccgcgagggcgcggcgcagccgagcagcggctctttcagcattggcaaccccaggggccaatatttcccacttagccacagctccagcatcctctctgtgggctgttcaccaactgtacaaccaccatttcactgtggacattactccctcttacagatatgggagacatgggagatccaccaaaaaaaaaacgtctgatttccctatgtgttggttgcggcaatcagattcacgatcagtatattctgagggtttctccggatttggaatggcatgcggcatgtttgaaatgtgcggagtgtaatcagtatttggacgagagctgtacatgctttgttagggatgggaaaacctactgtaaaagagattatatcaggttgtacgggatcaaatgcgccaagtgcagcatcggcttcagcaagaacgacttcgtgatgcgtgcccgctccaaggtgtatcacatcgagtgtttccgctgtgtggcctgcagccgccagctcatccctggggacgaatttgcgcttcgggaggacggtctcttctgccgagcagaccacgatgtggtggagagggccagtctaggcgctggcgacccgctcagtcccctgcatccagcgcggccactgcaaatggcagcggagcccatctccgccaggcagccagccctgcggccccacgtccacaagcagccggagaagaccacccgcgtgcggactgtgctgaacgagaagcagctgcacaccttgcggacctgctacgccgcaaacccgcggccagatgcgctcatgaaggagcaactggtagagatgacgggcctcagtccccgtgtgatccgggtctggtttcaaaacaagcggtgcaaggacaagaagcgaagcatcatgatgaagcaactccagcagcagcagcccaatgacaaaactaatatccaggggatgacaggaactcccatggtggctgccagtccagagagacacgacggtggcttacaggctaacccagtggaagtacaaagttaccagccaccttggaaagtactgagcgacttcgccttgcagagtgacatagatcagcctgcttttcagcaactggtcaatttttcagaaggaggaccgggctctaattccactggcagtgaagtagcatcaatgtcctctcaacttccagatacacctaacagcatggtagccagtcctattgaggcatgaggaacattcattctgtattttttttccctgttggagaaagtgggaaattataatgtcgaactctgaaacaaaagtatttaacgacccagtcaatgaaaactgaatcaagaaatgaatgctccatgaaatgcacgaagtctgttttaatgacaaggtgatatggtagcaacactgtgaagacaatcatgggattttactagaattaaacaacaaacaaaacgcaaaacccagtatatgctattcaatgatcttagaagtactgaaaaaaaaagacgtttttaaaacgtagaggatttatattcaaggatctcaaagaaagcattttcatttcactgcacatctagagaaaaacaaaaatagaaaattttctagtccatcctaatctgaatggtgctgtttctatattggtcattgccttgccaaacaggagctccagcaaaagcgcaggaagagagactggcctccttggctgaaagagtcctttcaggaaggtggagctgcattggtttgatatgtttaaagttgactttaacaaggggttaattgaaatcctgggtctcttggcctgtcctgtagctggtttattttttactttgccccctccccactttttttgagatccatcctttatcaagaagtctgaagcgactataaaggtttttgaattcagatttaaaaaccaacttataaagcattgcaacaaggttacctctattttgccacaagcgtctcgggattgtgtttgacttgtgtctgtccaagaacttttcccccaaagatgtgtatagttattggttaaaatgactgttttctctctctatggaaataaaaaggaaaaaaaaaaaggaaactttttttgtttgctcttgcattgcaaaaattataaagtaatttattatttattgtcggaagacttgccacttttcatgtcatttgacattttttgtttgctgaagtgaaaaaaaaagataaaggttgtacggtggtctttgaattatatgtctaattctatgtgttttgtctttttcttaaatattatgtgaaatcaaagcgccatatgtagaattatatcttcaggactatttcactaataaacatttggcatagataaataaataaaaaaaaaaaaaa

SEQ ID NO: 342 - DNA, 2887 bp, Homo sapiens
ggagctgagaggaacaggaagtgtcaggactttacgacccgcgcctccagctgaggtttctagacgtgacccagggcagactggtagcaaagcccccacgcccagccaggagcaccgccgaggactccagcacaccgagggacatgctgggcctgcgccccccactgctcgccctggtggggctgctctccctcgggtgcgtcctctctcaggagtgcacgaagttcaaggtcagcagctgccgggaatgcatcgagtcggggcccggctgcacctggtgccagaagctgaacttcacagggccgggggatcctgactccattcgctgcgacacccggccacagctgctcatgaggggctgtgcggctgacgacatcatggaccccacaagcctcgctgaaacccaggaagaccacaatgggggccagaagcagctgtccccacaaaaagtgacgctttacctgcgaccaggccaggcagcagcgttcaacgtgaccttccggcgggccaagggctaccccatcgacctgtactatctgatggacctctcctactccatgcttgatgacctcaggaatgtcaagaagctaggtggcgacctgctccgggccctcaacgagatcaccgagtccggccgcattggcttcgggtccttcgtggacaagaccgtgctgccgttcgtgaacacgcaccctgataagctgcgaaacccatgccccaacaaggagaaagagtgccagcccccgtttgccttcaggcacgtgctgaagctgaccaacaactccaaccagtttcagaccgaggtcgggaagcagctgatttccggaaacctggatgcacccgagggtgggctggacgccatgatgcaggtcgccgcctgcccggaggaaatcggctggcgcaacgtcacgcggctgctggtgtttgccactgatgacggcttccatttcgcgggcgacgggaagctgggcgccatcctgacccccaacgacggccgctgtcacctggaggacaacttgtacaagaggagcaacgaattcgactacccatcggtgggccagctggcgcacaagctggctgaaaacaacatccagcccatcttcgcggtgaccagtaggatggtgaagacctacgagaaactcaccgagatcatccccaagtcagccgtgggggagctgtctgaggactccagcaatgtggtccaactcattaagaatgcttacaataaactctcctccagggtcttcctggatcacaacgccctccccgacaccctgaaagtcacctacgactccttctgcagcaatggagtgacgcacaggaaccagcccagaggtgactgtgatggcgtgcagatcaatgtcccgatcaccttccaggtgaaggtcacggccacagagtgcatccaggagcagtcgtttgtcatccgggcgctgggcttcacggacatagtgaccgtgcaggttcttccccagtgtgagtgccggtgccgggaccagagcagagaccgcagcctctgccatggcaagggcttcttggagtgcggcatctgcaggtgtgacactggctacattgggaaaaactgtgagtgccagacacagggccggagcagccaggagctggaaggaagctgccggaaggacaacaactccatcatctgctcagggctgggggactgtgtctgcgggcagtgcctgtgccacaccagcgacgtccccggcaagctgatatacgggcagtactgcgagtgtgacaccatcaactgtgagcgctacaacggccaggtctgcggcggcccggggagggggctctgcttctgcgggaagtgccgctgccacccgggctttgagggctcagcgtgccagtgcgagaggaccactgagggctgcctgaacccgcggcgtgttgagtgtagtggtcgtggccggtgccgctgcaacgtatgcgagtgccattcaggctaccagctgcctctgtgccaggagtgccccggctgcccctcaccctgtggcaagtacatctcctgcgccgagtgcctgaagttcgaaaagggcccctttgggaagaactgcagcgcggcgtgtccgggcctgcagctgtcgaacaaccccgtgaagggcaggacctgcaaggagagggactcagagggctgctgggtggcctacacgctggagcagcaggacgggatggaccgctacctcatctatgtggatgagagccgagagtgtgtggcaggccccaacatcgccgccatcgtcgggggcaccgtggcaggcatcgtgctgatcggcattctcctgctggtcatctggaaggctctgatccacctgagcgacctccgggagtacaggcgctttgagaaggagaagctcaagtcccagtggaacaatgataatccccttttcaagagcgccaccacgacggtcatgaaccccaagtttgctgagagttaggagcacttggtgaagacaaggccgtcaggacccaccatgtctgccccatcacgcggccgagacatggcttgccacagctcttgaggatgtcaccaattaaccagaaatccagttattttccgccctcaaaatgacagccatggccggccgggtgcttctgggggctcgtcggggggacagctccactctgactggcacagtctttgcatggagacttgaggagggagggcttgaggttggtgaggttaggtgcgtgtttcctgtgcaagtcaggacatcagtctgattaaaggtggtgccaatttatttacatttaaacttgtcagggtataaaatgacatcccattaattatattgttaatcaatcacgtgtatagaaaaaaaataaaacttcaatacaggctgtccatggaaaaaaaaaaaaaaaaaaaaaa

SEQ ID NO: 343 - DNA, 1782 bp, Homo sapiens
gaattccggaaatgaccctgcccgggggcccaacgggcatggcgcggccggggggcgcgaggccctgcagcccggggctggagcgggccccgcgccggagtgtcggggagctgcgcctgctcttcgaggcgcgctgtgcggcggtcgctgcggccgccgccgcgggggagccccgggcccgcggggccaagcggcgtgggggacaggtccccaacgggcttccgcgggctcccccggccccggtgatccctcagctgaccgtgacagccgaggagcccgacgtgcccccgaccagccctgggccgccggagcgggagagggactgcctcccggcagcgggctcttcgcacctgcagcagccgcgccgcctttccacctcgtcggtctcctccactggctcctcgtcgctgctcgaggactcggaggacgacctgctgagcgacagtgagagccggagccgcggcaacgtgcagctggaagcgggcgaggacgtgggtcagaaaaaccactggcagaagatccggaccatggtcaatctgccggtcataagccctttcaagaagcgctacgcctgggtgcagctggcagggcacactgggagttttaaggcggcgggcaccagcgggctgatcctgaagcgctgctcggagccggagcgctactgcctggcgcggctgatggctgacgcgctgcgcggctgcgtgcctgccttccacggcgtggtggagcgcgacggcgaaagctacctgcagctgcaggacctgctcgatggcttcgacggaccttgtgtgctcgactgcaaaatgggcgtcaggacttacctagaggaggagctgaccaaggcccgtgagcggcccaagctgcggaaggacatgtacaagaaaatgctggcggtggatcctgaagctcccacggaggaggagcacgcgcagcgcgccgtcaccaagccgcgctacatgcagtggcgggaaggcatcagctccagcaccaccctcggcttccgcatcgagggcatcaagaaagcggacggctcctgcagcaccgacttcaagactacgcgaagccgagagcaggtgcttcgcgtctttgaagagtttgtgcaaggagatgaggaagtgctgaggcggtatctgaaccgcctgcagcagatccgggacaccctggaggtatccgagttcttcaggaggcacgaggtgatcggcagctcgctcctctttgtgcacgatcactgccatcgcgccggcgtgtggctcatcgacttcggcaagaccacgcccctccccgatggccagatcctggaccaccggcggccctgggaggagggcaaccgcgaggacggctatttgctggggctggacaatctcattggcatcctggccagcctggctgagagatgaggctggactcctgtccccgcgggccgctcacctgacatgtggacctgcagctttgtccccactgtgcatgccggcttgagactggagccccgcggtgcagggcagttcaccgggtcctgcaggaccaggtgccagccactaagggggggcaccgccgatgccaggggttttgcccacccgggccccagcgttcccagagccaaatgacactaacttatagaaggggagggggcaaagggcttcttcctcaggccagctcttctgaggaggctctgccctctccagaggtgccagaccgcggattttatttagcaagcccagaccttccggtctaacgtctcacaccacgacggactccccttcctaataaaactcaaagacaaaa

SEQ ID NO: 344 - DNA, 5097 bp, Homo sapiens
ctgcaggaaggagagaggaagaggagcagaagggggcagcagcggacgccgctaacggcctccctcggcgctgacaggctgggccggcgcccggctcgcttgggtgttcgcgtcgccacttcggcttctcggccggtcgggcccctcggcccgggcttgcggcgcgcgtcggggctgagggctgctgcggcgcagggagaggcctggtcctcgctgccgagggatgtgagtgggagctgagcccacactggagggcccccgagggcccagcctggaggtcgttcagagccgtgcccgccccggggcttcgcagaccttgacccgccgggtaggagccgcccctgcgggctcgagggcgcgctctggtcgcccgatctgtgtagccggtttcagaagcaggcaacaggaacaagatgtgaactgtttctcttctgcagaaaaagaggctcttcctcctcctcccgcgacggcaaatgttctgaaaaagactctgcatgggaatggcctgccttacgatgacagaaatggagggaacatccacctcttctatatatcagaatggtgatatttctggaaatgccaattctatgaagcaaatagatccagttcttcaggtgtatctttaccattcccttgggaaatctgaggcagattatctgacctttccatctggggagtatgttgcagaagaaatctgtattgctgcttctaaagcttgtggtatcacacctgtgtatcataatatgtttgctttaatgagtgaaacagaaaggatctggtatccacccaaccatgtcttccatatagatgagtcaaccaggcataatgtactctacagaataagattttactttcctcgttggtattgcagtggcagcaacagagcctatcggcatggaatatctcgaggtgctgaagctcctcttcttgatgactttgtcatgtcttacctctttgctcagtggcggcatgattttgtgcacggatggataaaagtacctgtgactcatgaaacacaggaagaatgtcttgggatggcagtgttagatatgatgagaatagccaaagaaaacgatcaaaccccactggccatctataactctatcagctacaagacattcttaccaaaatgtattcgagcaaagatccaagactatcatattttgacaaggaagcgaataaggtacagatttcgcagatttattcagcaattcagccaatgcaaagccactgccagaaacttgaaacttaagtatcttataaatctggaaactctgcagtctgccttctacacagagaaatttgaagtaaaagaacctggaagtggtccttcaggtgaggagatttttgcaaccattataataactggaaacggtggaattcagtggtcaagagggaaacataaagaaagtgagacactgacagaacaggatttacagttatattgcgattttcctaatattattgatgtcagtattaagcaagcaaaccaagagggttcaaatgaaagccgagttgtaactatccataagcaagatggtaaaaatctggaaattgaacttagctcattaagggaagctttgtctttcgtgtcattaattgatggatattatagattaactgcagatgcacatcattacctctgtaaagaagtagcacctccagccgtgcttgaaaatatacaaagcaactgtcatggcccaatttcgatggattttgccattagtaaactgaagaaagcaggtaatcagactggactgtatgtacttcgatgcagtcctaaggactttaataaatattttttgacttttgctgtcgagcgagaaaatgtcattgaatataaacactgtttgattacaaaaaatgagaatgaagagtacaacctcagtgggacaaagaagaacttcagcagtcttaaagatcttttgaattgttaccagatggaaactgttcgctcagacaatataattttccagtttactaaatgctgtcccccaaagccaaaagataaatcaaaccttctagtcttcagaacgaatggtgtttctgatgtaccaacctcaccaacattacagaggcctactcatatgaaccaaatggtgtttcacaaaatcagaaatgaagatttgatatttaatgaaagccttggccaaggcacttttacaaagatttttaaaggcgtacgaagagaagtaggagactacggtcaactgcatgaaacagaagttcttttaaaagttctggataaagcacacagaaactattcagagtctttctttgaagcagcaagtatgatgagcaagctttctcacaagcatttggttttaaattatggagtatgtgtctgtggagacgagaatattctggttcaggagtttgtaaaatttggatcactagatacatatctgaaaaagaataaaaattgtataaatatattatggaaacttgaagttgctaaacagttggcatgggccatgcattttctagaagaaaacacccttattcatgggaatgtatgtgccaaaaatattctgcttatcagagaagaagacaggaagacaggaaatcctcctttcatcaaacttagtgatcctggcattagtattacagttttgccaaaggacattcttcaggagagaataccatgggtaccacctgaatgcattgaaaatcctaaaaatttaaatttggcaacagacaaatggagttttggtaccactttgtgggaaatctgcagtggaggagataaacctctaagtgctctggattctcaaagaaagctacaattttatgaagataggcatcagcttcctgcaccaaagtgggcagaattagcaaaccttataaataattgtatggattatgaaccagatttcaggccttctttcagagccatcatacgagatcttaacagtttgtttactccagattatgaactattaacagaaaatgacatgttaccaaatatgaggataggtgccctagggttttctggtgcctttgaagaccgggatcctacacagtttgaagagagacatttgaaatttctacagcaacttggcaagggtaattttgggagtgtggagatgtgccggtatgaccctctacaggacaacactggggaggtggtcgctgtaaaaaagcttcagcatagtactgaagagcacctaagagactttgaaagggaaattgaaatcctgaaatccctacagcatgacaacattgtaaagtacaagggagtgtgctacagtgctggtcggcgtaatctaaaattaattatggaatatttaccatatggaagtttacgagactatcttcaaaaacataaagaacggatagatcacataaaacttctgcagtacacatctcagatatgcaagggtatggagtatcttggtacaaaaaggtatatccacagggatctggcaacgagaaatatattggtggagaacgagaacagagttaaaattggagattttgggttaaccaaagtcttgccacaagacaaagaatactataaagtaaaagaacctggtgaaagtcccatattctggtatgctccagaatcactgacagagagcaagttttctgtggcctcagatgtttggagctttggagtggttctgtatgaacttttcacatacattgagaagagtaaaagtccaccagcggaatttatgcgtatgattggcaatgacaaacaaggacagatgatcgtgttccatttgatagaacttttgaagaataatggaagattaccaagaccagatggatgcccagatgagatctatatgatcatgacagaatgctggaacaataatgtaaatcaacgcccctcctttagggatctagctcttcgagtggatcaaataagggataacatggctggatgaaagaaatgaccttcattctgagaccaaagtagatttacagaacaaagttttatatttcacattgctgtggactattattacatatatcattattatataaatcatgatgctagccagcaaagatgtgaaaatatctgctcaaaactttcaaagtttagtaagtttttcttcatgaggccaccagtaaaagacattaatgagaattccttagcaaggattttgtaagaagtttcttaaacattgtctgttaacatcactcttgtctggcaaaagaaaaaaaatagactttttcaactcagctttttgagacctgaaaaaattattatgtaaattttgcaatgttaaagatgcacagaatatgtatgtatagtttttaccacagtggatgtataataccttggcatcttgtgtgatgttttacacacatgagggctggtgttcattaatactgttttctaatttttccatagttaatctataattaattacttcactatacaaacaaattaagatgttcagataattgaataagtacctttgtgtccttgttcatttatatcgctggccagcattataagcaggtgtatacttttagcttgtagttccatgtactgtaaatatttttcacataaagggaacaaatgtctagttttatttgtataggaaatttccctgaccctaaataatacattttgaaatgaaacaagcttacaaagatataatctattttattatggtttcccttgtatctatttgtggtgaatgtgttttttaaatggaactatctccaaatttttctaagactactatgaacagttttcttttaaaattttgagattaagaatgccaggaatattgtcatcctttgagctgctgactgccaataacattcttcgatctctgggatttatgctcatgaactaaatttaagcttaagccataaaatagattagattgttttttaaaaatggatagctcattaagaagtgcagcaggttaagaattttttcctaaagactgtatatttgaggggtttcagaattttgcattgcagtcatagaagagatttatttcctttttagaggggaaatgaggtaaataagtaaaaaagtatgcttgttaattttattcaagaatgccagtagaaaattcataacgtgtatctttaagaaaaatgagcatacatcttaaatcttttcaatta

SEQ ID NO: 345 - DNA, 6255 bp, Homo sapiens
actcgcctggagcgcgcgggcaaggcgggcggagcgcactggaactcaagggggcgcacagcggcgcgctcgcaccgctcggctccgcgcggctctaggaggtggcggcggtggcggtggcggcggtggcggcggcggcggcggcggggcgcagggctgagcgagcgtccgggttccggggctccggggaaggcggttgcagctcctgagtgcagcgcggcttcctgccactgtcccggcccggccacctctctgtcatggctctggcggacagcacacgtggattacccaacgggggcggcggcgggggcggcagtggctcctcgtcgtcctccgcggagccaccgctcttccccgacatcgtggagctgaacgtggggggccaggtgtacgtgacccggcgctgcacggtggtgtcggtgcccgactcgctgctctggcgcatgttcacgcagcagcagccgcaggagctggcccgggacagcaaaggccgcttctttctggaccgggacggcttcctcttccgctacatcctggattacctgcgggacttgcagctcgtgctgcccgactacttccccgagcgcagccggctgcagcgcgaggccgagtacttcgagctgccagagctcgtgcgccgcctcggggcgccccagcagcccggcccggggccgccgccctcgcggcgcggggtgcacaaggagggctcgctgggtgacgagctgctgccgcttggctactcggagcccgaacagcaggagggcgcctctgccggggcgccgtcgcccacgctggagctggctagccgcagtccgtccgggggcgcggcgggcccgctgctcacgccgtcccagtcgctggacggcagccggcgctcgggctacatcaccatcggctaccgcggctcctacaccatcgggcgggacgcgcaggcggacgccaagttccggcgagtggcgcgcatcaccgtttgcggaaagacgtcgctggccaaggaggtgtttggggacaccctgaacgaaagccgggaccccgaccgtcccccggagcgctacacctcgcgctattacctcaagttcaacttcctggagcaggccttcgacaagctgtccgagtcgggcttccacatggtggcgtgcagctccacgggcacctgcgcctttgccagcagcaccgaccagagcgaggacaagatctggaccagctacaccgagtacgtcttctgcagggagtgagctccccagaccccctcgccactccagcgcccagtccttctcctgcccgagagatgattacagagcctcttgtcccacctttgtcccctggctgctgccctcccattctccccctccagtagtagctgggtgagacctgtccgcccaccttccctccactacagaacctgcagccgcaaatcctctgggctgcttcgtcttctttggacctcctgaaccgagagaacccagaggaacccccaccccacccccacctaccactccatgctttctctactccctgcctcaaaccacccctcccccagatggtacttcagtttggatctattgggggagtgtggccacagaccgggggatgattgaattgttcagaacctgattggaccgtgtccaatgtgcggaagatttccttgaaatcttctcaagctcttatgactcactgggggtttaagagatcaggattggttccactgtctggggttagtgttttacaaggtcattacacagtctttttgacctcttttgaaggtagagttttagaaggctggatggaagattctgagcctggaattaggaccccatggaggcagttcagtaactaaactaataaagttttgaaaagttacacgtaaagtagaagaatctagtgcgtgggacagtaaaggatcctttctcgtacagaataaaaggtctcagcctgtagcttaaacttatagaaagtgatccgcctgcctgcagaggcgcccttttcagctgctgctcgccagaagcccttgattccactggttgacatggcagcagttactggcaagagggagaaaggacgctgccgcctaagagtgcaaggctgctcaggtctccaagcgccgtaggaggtcacctggcagtgactgtagggagctgggtcatagtgcacgtcgtgggtattaggaaagcctgtattctttcaatgaatgtcagtaggaccttcctttagctgtaagacttggtgggcggggtggggtggggagggaggaaagggtaggaagggtgggaagggagaagcagacatagtcatttatgatttgaaagttggaagtttgtaccatctgtttgagtatatgcacatttaaaaaatatcatatagtaaatgcaaacatgccaagtattttataaagattaataacagacctactcttacctggcagtttacttaacttactgttttgagtcctaaacttagagttgttaatgcttatatataatctaaccaaagagttacccagtagggttttagtttttgaacttttattttcttgttgattataaatcctgattttggaatctattgcgcaaaagaagtttcattttggttacttagacctaagatcacttattaaaaatccttattttctccaagcccagcaaacgttgacttctgggcaaacctgaaaacctgaaaatgccactttcatgcagtttgtttgaagttaagtggaatcctttcaaatgacgagctgcagagaactcagcaccaagggctgcctatctgtagatagctgtaaaatggaatatttttaaatgaaggcaaataagtacttaaaagtgagctgagcaataaaatggtccaataataggtaaatgcaacagaaacagaaggagacctggttgccttatgcctttactcttacatggaataaattcccaatgcatatcctatgtaaaccataagtgaagggaaataaacctcgtcatgctccatgctgtgaggtgtcctttggatattctgtgatgacagagaagcctattttgttttgttttcagcatctttctctgatgtacgtttttaaggattttgtaagagctgttttcagtgtttaaattagtgctatttttccttgtttttaaaaatgaatctcgtactgtatcttactatgtccatacagatgttacaaatcgacagttttattcttagactcatgtgatccaagctgtatataccatatataaacattttacatgaatcatttagttttttaattcatttactaatgctataaaatttcctatattaccccagtaatttgcatcagctggtttatatactaaagcaacatgttttgatgagtttcttacatccttatcgaggaattgggttaggaaaaaatacataattgtaaaactgagtttgctgtattatactttttttcttgagtattagttgtattactaatcatatgttgattaactgtctacttaaagtcaaggtacctgtatttttaatccactaatttttttttagttgggaaatagatttcaggtcttttattagactaacattttttgagaagtaaaattgacttcatatacaaagcctgtaattttaggcgaaatggaagcagaaatctaggaagttgtgcttgcttgtatgttgagtttggtctcagactaagtaatgcatcagaattcatctgtttgaagcctgaaataatttaggactctgattcactgaccaaaagtcagtgttgcagagatttctctaccccgtatggtattttgttagattgttcaacaggaagcacatgattgagaacatcttgggacagaccaaaaccactgacagatggcaaggctcggcgattctgatttcccttctcaaatctgctcaactccaagagtcttgagaaactgctaaaattttgcctctgtcactcaagtcttacaaatgttatcttgtaaacctttgaggtgaactattccactgtcttgtacataggcatcttattcactgcaccctgtcacacccagcaccccccgccccgcacattatttgaaagactgggaatttaatggttagggacagtaaatctacttctttttccagggacgactgtcccctctaaagttaaagtcaatacaagaaaactgtctatttttagcctaaagtaaaggctgtgaagaaaattcattttacattgggtagacagtaaaaaacaagtaaaataacttgacatgagcacctttagatcccttcccctccatgggctttgggccacagaatgaacctttgaggcctgtaaagtggattgtaatttcctataagctgtaatagtggaggtattgtgggttcatttgagtaagccctccaaagataccattcaaataacctgggagaatgtcataaattattcagataattaacactgcatgaatctgattcagaggcatgcatttacatatgttgccctaattaccatttgatgatcataaatacaagtgaatgacattggacttttagtaacaaacttaatttttaaaaaggtgtagacaatggtggttaaaaaaaaaaaaaaaacaggtaccaggttctgtgtgtttgcaccaagtaattgacatgttttttaatacatgtggaccatgaacagtattcattctactttttcaaatgatatgctgtagaaaatattccttgaagatgtgagatttaaaaatttttccctttcaatgttgttatgtattctactggtttttgattgatagcacagtgataaatcataatactagacaaaattgtcttctctttcaaaccagagccatatatatgtctgtatatatgggacctactgcttctctgaggaaatgcataatctgttaatatcagacaaaatgagcaattggcagtgctcataatatattccaatttttattggaattttcgatggaatgttatttcaataaagccatgtaaggtgaaactttgataactttttactcttcaagttagggtaaattctgatccaatattcaattcatttgtgtactcccacatgcaaaatgctaaattacaatgcagacattaagaaaaagtattgactggaggggttgaattccttgagaatttattttatagtctaaatcacaaatactttactcaatttagtttttaaaatagtaaactgaatatttttgttgtaagcctatcagagtcaatccttcgtttggaattgttttcctgtttttccttactataaatcatttaaaaactgaattcattttcttagatggcataagtctgtctcttgagaaataagtaaaatactcctattttcagtatctgtagcacctgaaataggtctttgtatagccagaaacaagttatgttgaagttagcttttctttgtcaacagttttggacaataaaaatctgaaagtattaacacttgattttctactggggcccttcaaacttggttggaagaaattcaaccagaatatctacattagagtataatcatgtgtggtaggaagatggactagttaatcaagatttgttgtcacttaaattttttgtgatttttttccaagccagtttttttaaattctaaatgtgttttgaggtatgggtacattaattgtaatgtaaactattatacaactgtttttgcgactttataggcaggtaaattttgctattactattgaatacaaatgacaattcatttatgaccactcaaacagcgttagtaaccatttagtgacaaaggattaaaacatccatctggatgttaattttgaagatgtaaattatatgttgtttaaatttttccaggcatctgaaaaccttatctgctagacaatgtaagattcacacagagttatctgggattctgattttttaaatagtacatatcattaaaccattttctctaaatgtaagaagagcagaaaaaatcttataagattatcagatttttctaatgacacagaaatgtaagaaaaaaatccctttatattgaaaaaagatgcagtcaaagtcttttcagacatgcccaaactttgagaatttcttcaaccatctaatgctataaagatttttgttcttcctgttcacaaccagttgtataacagaaatactagctactgttttccttcctgtgtgtgaagtaatgaatcattgattatgtgacttgttatgtattcaattaaacactaaagaataaaacattcactcctttaattattcaaaaaaaaaaaaaaaaaa

SEQ ID NO: 346 - DNA, 1688 bp, Homo sapiens
acttccgctggcccaagtgatctgcatgtggcagggctgcgcagtggagcggccagtgggcaggatgacgagccagacccctctgccccagtccccccggcccaggcggccaacgatgtctactgttgtggagctgaacgtcgggggtgagttccacaccaccaccctgggtaccctgaggaagtttccgggctcaaagctggcagagatgttctctagcttagccaaggcctccacggacgcggagggccgcttcttcatcgaccgccccagcacctatttcagacccatcctggactacctgcgcactgggcaagtgcccacacagcacatccctgaagtgtaccgtgaggctcagttctacgaaatcaagcctttggtcaagctgctggaggacatgccacagatctttggtgagcaggtgtctcggaagcagtttttgctgcaagtgccgggctacagcgagaacctggagctcatggtgcgcctggcacgtgcagaagccataacagcacggaagtccagcgtgcttgtgtgcctggtggaaactgaggagcaggatgcatattattcagaggtcctgtgttttctgcaggataagaagatgttcaagtctgttgtcaagtttgggccctggaaggcggtcctagacaacagcgacctcatgcactgcctggagatggacattaaggcccaggggtacaaggtattctccaagttctacctgacgtaccccaccaaaagaaacgaattccattttaacatttattcattcaccttcacctggtggtgatcctcaggagcagagactgttatgaattctggcgtggcttatgaaattaaaagttgccatcaaagccattttcttttaatttcacaaacatcaggcaatttccagggttggtctagagtcttgccactaaatattgatcactcgtttaaggactttccactccattgcaactgatgccactatatttgcctagcaacttgcagctacttccttttcaaagcctcatgtatctcccagacccttctcttgaagtccaataacaagaccaagtaagaatgtttcaacaatgcgttggcaagagatgtgagatgacaacaggaacatacaagatactgtgaatctagatgttctgacctaaagatgtagtctacatagccccagcttggggtccaatccatctgtccctggcatgtgccttcatgtagtaggtgctttcctgatcccctttgcgagatgctgtgggtgctaacacctcagagctgtcctcttctctagagtggaggttttcaaagtgcatcatcagcattacctgtgaacttgctggaaatacaaatcctcaggccccacctcagacctactgaatcagaatctctgggggttggcacagcattctgatttaccaaaccctccaagtgattttgatgtattctaattttgagaccatctctagaaaagaattgctacctcttgtatggaggtacaaaagactgacctcttacatcaaggaacttcctttcccagagctcctcatggaatcaagctgaagtcagtcttcttctgagagcacattcttactcagtttttttcctctgtcctacgctgcttccctcactccccttctcctaagagcactccatcaataaaccacttgcacgagaaaaaaaaaaaaaaaaaa

SEQ ID NO: 347 - DNA, 1705 bp, Homo sapiens
gggcggcggcgcgcgggtgcgatcgcggagctgtgaggcgcaggcagggctctggggcacctagagaccggggccggagacgtggcagccgccctgcccgccagaaagtttcctagaagtttgctgggcgcgggcgcacgactgactggctggaccatgaacgtgttccgaatcctcggcgacctgagccacctcctggccatgatcttgctgctggggaagatctggaggtccaagtgctgcaagggcatctctgggaagagccagatcctgtttgctctcgtcttcaccaccaggtacctggacctgttcaccaacttcatctccatctacaacacagtaatgaaggtggtttttctcctctgtgcctatgttacagtgtacatgatatatgggaaattccgtaaaacttttgacagtgagaatgacacattccgcctggagtttcttctggtcccagtcattggcctttccttccttgaaaactacagtttcactctgctggagatcctctggactttctctatctatctggaatcagtggctatcctgccccagctcttcatgatcagcaagactggagaggctgagaccataactactcactacctgttctttctgggtctgtaccgggcactctacctggctaactggatcaggcggtaccagactgagaatttctatgaccaaattgcagtcgtgtctggagtagtacaaaccatcttctactgtgacttcttctacttgtatgtgaccaaagtccttaagggaaagaagttaagtcttccaatgccaatctgaggaccttcagagacagtctacgccttaacaagcacatgaaggaaactattttgaatgttctctttggcaacttatccataatttgggatcaaatgttaaaaccagaaaagtgtttagtgtggatttcagcaaaacctgatcatcccacccagaagaccttctcatcaatagatcgcccttaaagacccattgtaaggtcataaaaaacctcggccacctgcacaaagatggtgcctcactgcaacaagaaaccttaaggtgtcttaccgacgaaataaaaaacataaatgattgttctccaaggcctgagggcaagactcatgatgagcaagtcaaccccaatctggaacaatgtccctcctcttagaatgtcccaactaaagaccagttaaaatattagggtacgttcttgtgaatttccactttccaggtagatgaccaaatttaggtggtcaagatataaaggtgtcagctagttttaagtgtgaaacttatttcactttcacactgccttcaggccagaagcaaaccaaatttaccaggtttggctggaggagttttgtgactcatcttttactggtttgaattttttcaaaccagtggctgatacctgccttgtacttagtaccttaataccaataacctaatggtacttaggcgagtaccatttgcacaatcactgttttacttatgagcagatacagatatatccaaacccttacctactaggtatcctgctagggttttcaattccaattcttgtattaagttttttcctttcagttttaggtgcgaaagtaatcagtcaatccaatatcccccatctttgtcttgaaacaaaaactgttttaagacgtctacgttgaattattcagagaattaagcaataaaagctcacacctta

SEQ ID NO: 348 - DNA, 7909 bp, Homo sapiens
ttcaagtatggcagacaaaggatgttctgcgtggggaaatgtggtgacacccatttcacaaggacagctcacatagattgagtgctcaggaaggaccagcaccatacccagtgcctgatgtgtatcatctcaattagtccttgcctcagatgcaaaaggaaaccatcgccatcatcatcaccaccatcatcatcttcctcctgtgcagatggaaaggctgaggcatagagaggtgacggagtctgcccaggactgcaagcctgctggtggcagagccaggttccaatggaatgaaggctgtcatcctcagatggcagggtaggcaggtggctagagctcacttgggagaaggggaaaggacactgactttggctagggatggagcagagcttgggctggctttccatgcacgggcagggggcgtggctcatggctacgctccagccccgggtgtggacattgaatcttccaggtctaccctaggctatgggtctggacagcactgtgatggaaagaagacactctatgtcctgcattctgtgaccaatgatgtgactgtgggaatggcgctggcatctggctgccactctgggacgggtggccagctgccatcaggccccacccaggatgggaccaccatgcgacttcttccctcgctcctcctggtcatgtccagagccccaggaggaccagcaaagcctctcgagccgatggcagctcacgttctgccttgtcagctactcctctcctgggcaatattggctgcttgctgtggctctccccggggtatgtgactgcctctgtgctgggcacctggcctgggctttccttctgggcctgggcagctgggctcagcttggacccaggcagcagccacagaggggcccatggaggtgacagagttgcttctatgatggtgaacgggcagctgtgacacggaggaggcgaccactcctcagtttccaagtgctgcggtcagggccggggccagcaaagtccctcccatattcaaagagcgggtttgggtttgtcccaggaggacatagtcaggagcccatgctgggacatgcctcctccaaagttcagcctggatccccagcctctgccaacggccccgctccttagctaacccagcttgctcctgggttccacggcggagtcagatgtttctgggcagtttcacctttgtgccttaaatgcatgttgaggactttaaggaattgtggagaaatagggctgtggcaaaggcaagtgacaactgggaacaatgatcccgcagaggctgctgaggcctgggccccaggggcgtgggttcatccttctgcctgggctttggtgggaggggcagactctgtggtctgagacacaaaaaaacccaaaacatatgtgtgtacagacacacagcagagccacacacacacttgtgcccatgcacacactcacaggaggcccgtggactccgcacagggaagaaactcctccggtcgacagtggacggcgctgcagcagggactcacccccaagccctgcctgcctcccattgcccacctggccctggcttgatgggcttatctcatgctgtggccggggacctcttgcttcctgcaaccccttgctggactggggcctgggcctctcctgggctgtgcctagggtttgtaacccagggcctgtgccggcgtgcacagagcatctctccctgggaggctcagggctgcctcctcgagctctgtgggcctgcactggccggtgagcttgtggtgtgggttttcaggctgtatccttctacctcctgagcccaggggtcccaggcgccctgcagctgtctcctcggccatcctgtggggccccgaggccttgccctcacttcagtgcctgggtgctcaggctttgcccaggtgccaggagaaggtgtgagcatgagcctattggacacacctggcgacgtataccaggtgtcccacccctgccaccatggggcctcccgatacggcaaccaccacggacctgtggggaccaatgaggaaagagagaggcaggtctgggccaggctcacagggactccggcatagcagaccctgccccagcaggcccccttgtccttcctgggtcctggtccttcatgaggaactagcccatccctggtggggctcccaccccgcttctcagtgggctctatgcttgcctcgtcggagtcacccctcaggcagtcctgggatcctctcctttagacccactgtgccttcccggcctcccgggcttctgctgggggcagaagaaatgcctccccaggtctgtctctggaggctctgagggagatgggcttgggggctgtaggaggaggcagggattccagggtgtcaggaaggcaggggtgccaggtcccacctagtgaagtaataaaccgtgggtggtgatagtgacccagtgccctcactgcccagccccgcctgtcctcagccagcactgcagggatcccaggcccagactctggaggccttcactgatcccagccaccccagaaaagctgcagcctgcaggcaccagccgggccatatgcccagtgccagctagggcccaccgcccatcctgcacacggggccgctgggcaggtgcccctcacacccccaggatgtcagtgctcacctcgagcaaagcgccccagctcggccttgggaggtggtcatgtccagggggatgatggagagctgtccaaccaagagagcgggagggagggaaggagggagggagagagatagagagagagagagagagagaggaagtgtgggccctaaggctgccttagtggaggtgcgcgtggcctgcacctcaccaagcctagccactctcgcggctctgagtggctcacaggcttgtgagggccccgtcgctgcctgctgggtccccaccagggctccctctaggaatgcgccatggctgctatgacaatttgcacagcccagtggcttaaacaccatttataccacaggtccagatgaatcctgcagggccaaggtctgggggtgctggaggccatgctccctccaggcttgcggggagaacttccctgcctcctccagtctctccatccctgagctctcggctcctcctccgtcttcagggccagggcgtagcgtctgctctctcggcctctgcctccgcttcccacctcacctggcttctgtctatgtcagtctccctctgccaacctcctagaaggacacttgtgattacattagggctcacccctttaatccaggggagcctctccacttcatgattttcagctaacttgcttctgcacagaccccctttccctataagggcacacattcactggtcccggggctaaggaccttgctccaagtccctccacccatgatgctgtgccttccagaaacctgtcctctgcagctcggtcttgaccccaagcctgctggtgacctgaacttcacagggttatccccttggactgtgtgcagcacgatgcaatttctgggcctgaatgtcatgctccctggggcaggaccttgagcctgcagcacacactaggccacctgcagtctcacaggccatgccctgggtagacagggaggtgctcaaccccagctcgggtcctctagtctgcctggctaccatgcttctcactctcctgcatctgcagaccctgcgttgccatgtgaggcaggggtggggtggggctgagggcgtggctttggtccctggctgtccggatgaagtaccagagtgacgccacagcccatcccggtgacatgctcacccccaacccccgtgtccgggaccccggtcttgtgtggtccctgatgtggagtcctcagtccttaagatacatccagaaagtcctggccatgaattggaggtgcagagtcctgcagagcctctgggctgggctggtgcccccaggagatggagggcctggtggatgccctcctccctcagagctggggcagctgcctcccaggggtgggactctgggctcagagagaggcccttgagctgcagctcagggggatgcgaggcttcgtggactgtgtcctggtccatgtggtgcacgtgtctccacctccaaggagaggctcctcagtgtgcacctcccccacatccgtcctctctgccggccccgggcgtctgagcagtcattccatgccagcacctctgcagcctgctgggcctcaggttctctgtgagggacctccccggccttcggcggaggtggagtaagctccgtcaaggcaggtggcttcgtcccttcctgtgagtgacaccagtgatgaaatggacccctccacacaggcatcctcagggcacagggccctgggggcaccttcctcctttcgtatttgttgagaaaaaaagtggcattgcgctcacaccaggatgctggagcagagctgacatgctcgggaaagggcagaggtcactgggggtgggaaggtcatccagtccagactcagcacctcgtgggctggtaaactgaggctcaaagtgctggtgccaggcctgaggcctcgcggtgacccctctctctggttcccagcacctgcctgagacctgccccaggcacccataacctggaattccctgtttccttgtccagggcctgaggaaatggctccccaggtctgtctctggatgctctgaggcagatgggcttgggggctctaggaggaggcagggactccagggtgtcaggaaggcaggggtgccgggtcccacccagtggagtaacaaactgtgggtggcgtttgggcctccccgccttccccactgggtgtgctggtgctggcgctgctgggtcagggctgcccgtgaccccagacaccactgtccatcctgtgaggctcccgtctgggcatgtcctgggtggattcctcctttctgttaagtagctacatgaggcaggggctcctggatccaaagcaaatgacaggaattccagagccaggtgcatccactcagggcagccagtgttggtggagctgcctctagcacatggaggagagtgaaagtcagcctgcccctctcacgagaaaagaacctggggatacctctcagcctccagcgttgcaagtgcaaggccagtggagttaatctgcaacgtgcacgagggcgtgtgtcagtggctgtgtgcaggagtgtgagtgagcaagagcaagagcgcatggctcctgctgtacctcaaggtgtgggctcctggtggctgctcagtgttcccaggggtgagaggcctcatgtatcctaggctgcctgagatttctgtgtgctgatcgcatcctcagtttcttgtccaccgcttcactggcaagagtcccaggctccaaggacaccctccctgcacatgattgggtgttaatggtggcctgggttgtgtcttcccctggggatgagggttgggtgtccatggtgccctgggctgtgtcctcccctagggatgagggtcgggcctccacgatgccctgggctgtgtgctcttatgggaatgagggttgggtgtccaagatgccctgggctgtgtccttccctggggatgagggttggatgtccaagatgccctgggctgtgtactcccctaggaatgagggctgggtgtccaagataccctgggctgtgtcctcccctggggatgagggttgggtgtccatggtgccctgggctgtgtcctcccctggggatgacggttgggtgtccatggtgccctgggctgtgtttccttggggatgagggttgggtgctatggcatcctgggcaggtgcttcctttctgcacaagggttgggtgaccatgatgtcctggcaatggcttccctgggttgcctcttttctgccatgtgggaagagcaggggaggtttagttggtctcagcacatcattctctcaggataagtagaagagtgtctgagctgtgaggccagtgctccagctttggaattgtcttccccaccctcacctccatcccatcaaagcccgacatgtcgtgtggcagcagcgaggtgggtgttggctgttctcttgggctgggggttagtcgtggacggggaaaggagagatgctggtcaaagggcatgaagtttctgctgatgggaggagtcagttcttttgatctgttgcacagcatggtgactatagttaacaataatgactatttcaaaattgctaaaagatgagattttaaatgttctcaccacaaaatgataagtgtgtgaggtgatggatatgccacttaccttgttttaatcatcccacaatatagacaggcattgtcactttgcattgtaccccaggaatcttcacatttgcttttttgtcaattaaaaatagagacacaaaaggagagaggggagagcaatagactcttcacggaaccgtgggcttctgcctccgggtaaaataaactgcaaaaaggattcccaggaaaccgttccctctttcagcccttggttacaggaagccggatttgggaaatctgcctggatgacattcacatgaacgggcacatacaggaaaacacggtaatgtaattagaatagtcagagaaaagtagccagaaatgacattcacatgaacgggcacatacaggagaaaacacggtaacgtaattagaatagtcagagaaaagtagccagaaatgacattcacatgaacgggcacatataggagaaaccatggtaacgtaattagaatagtcagagaaaagtagccagaaatgacattcacatgaacgggcacatacaggaaaacacggtaatgtaattagaatagtcagagaaaagtagccagaaatgacattcacatgaacgggcacatacaggagaaaacacggtaacgtaattagaatagtcagagaaaagtagccagaaatgacattcacatgaacgggcacatacaggagaaaacacggtaacgtaattagaatagtcagagaaaagtagccagaagaatttgcaacgtgcccttgtaacaccaaatttgatcagttttttaaaaaatgatcgttatgtaggtgattgagaagtaaatgtattcttttttaaggtaaaaatttggacccttatcatgcatacccccctctgtgctcttcaaatcaacatcattattaatatctgtacatttttgctcatctgagccagcacaggctgaggctgtcagaatggacaccttttggttgttgggtttctgtcagtttctggggtgaagctgcgtgattgagaacgtagctcttggctgccatctcggggattattaaggactgtgaactctatccacaagccatggcaatatctgtcccaccgaatgctccctctaacacactcttactcccgtgatgtgtgttaagggctccgatgatgctgaaaacagcacaggatgtgaaaaggcaggaacagttctgaagtcaaaggctgatgtcctgtttctctttccctctgtgaccgactcccttcccagtggtaacaagtacccacagcttggtttgaatttctgcacgctgttgtctgtgcactcgctcacacttacgcacacagcaggcatgtgggcgatgctgggtattttgtgtatgagtgggatgcacatacacacatctacatccatatcatgcccatgcatctgtaacttgcttttcccgtgtaagaacacttcttagagtttgttcaatgcatgtgtctgtgtgaatgattgaaggcatttctaacccattttaaagatggctacttaggaccatatggatgttgtactgatgtcatttgaccacgtccattgtttccatcttttgggctgttcttgtgtattttactttccatgtaacactgtgacattgagaattggtacctacaacagtctatttgctttacattaaatttgtaggctaatttgtgtaaaaaaaaaaaaaaaaa

SEQ ID NO: 349 - DNA, 11640 bp, Homo sapiens
gaattgtctatttcacagcaatattaccagtgacttgaaagcatttacagacaagtttggttttgatgtcctcatcctgttctccagctatctgtcagaggagcagcagccgagacgacagattgctgtgtactcagaaaacatggagctgtgcagtcagatttgctgtgagctggaagagtgtcagaacccttgcctagaactggagccctttgactgtggctgtgatgagatcctggtgtaccaacaagaggacccttcagtgacttgtgatcaggtggttctcgttgtcaaggaagtcatcaacaggaggtgtccagagatggtctccaatagccggacatcctcaacagaagccgtggcaggcagtgcccccctctcccaggggtcttctgggattatggaattgtatggttctgacatagagccacaacccagctctgtgaatttcatagagaaccctccagatctcaatgattctaaccaggctcaggtggatgccaatgtagaccttgttagcccagacagcggactggctaccattaggagcagccgctcatccaaggagagctctgttttcctcagtgacgacagccccgtgggagaaggtgctgggcctcaccacacccttctcccagggcttgactcctacagccccatccctgaaggggcggtggcggaggaacatgcatggtctggagaacacggtgagcacttcgacctcttcaattttgacccagcacccatggcttctgggcagtcccagcaatcttctcattctgcagactactccccagcagatgacttcttccccaacagtgacctgtcagaaggacagctccccgctgggcctgaaggacttgatggcatgggaaccaacatgtctaattattcatccagttcacttttgtcaggggctggcaaagatagccttgtggaacatgatgaggagtttgtccagagacaagacagtcccagagataactctgaaagaaatttgagcctgacagattttgtgggagatgaatccccttccccagaaaggctaaaaaatactggaaagaggatcccaccaacacccatgaatagtttagtagaaagctcgccatccactgaagaaccagcctcactctatacagaagatatgacccaaaaagcaactgacacaggtcacatggggccacctcagacccatgcacggtgcagcagctggtggggtggtttggaaattgactccaaaaatattgcagatgcgtggagttccagtgaacaggaatctgttttccagagccctgaatcatggaaagagcataagccaagctccattgataggagagcctcagattctgtatttcaaccaaagagcctcgaatttacaaagtcaggtccctgggagtctgaatttggtcagcctgaactgggtagcaatgatattcaagacaaaaatgaggaaagcttgccgttccagaacctgcccatggagaagtcacctttgccaaatacatctccccaaggaacaaaccacctgatagaagactttgcttctttgtggcattctggtcgctctcccacagccatgcccgagccctggggaaatcctacagatgatggtgaaccagcagctgtggcgccattcccagcctggagtgcatttggtaaagaagatcatgatgaagctttaaaaaatacctggaatttgcacccaacaagcagcaagacaccttctgttagggacccgaatgagtgggccatggcaaaaagtgggtttgccttttcttcttcagaactactggacaattcacccagtgagataaacaatgaagcagctccagaaatctggggcaagaaaaacaatgactccagggatcacatctttgcacctggaaatcccagttctgatctggatcacacatggactaattctaagccaccaaaagaagatcagaatggtttagtggatcctaaaactaggggcaaggtatatgaaaaggtagattcctggaacctttttgaggagaatatgaagaaaggagggtcagatgtcctagttccttgggaagattccttcttatcttacaaatgttctgattacagtgcatccaacctaggagaagattcggtgccttcccccttagataccaattattccacctcagactcttacacatcaccaacatttgctggagacgaaaaggaaactgaacacaagccatttgctaaagaggaaggttttgagtcaaaagatggtaactccacggcagaggagactgacattcctcctcagtcactgcaacagtcatctcgaaatcgaatcagttcaggtcctgggaacctagacatgtgggcttcacctcatacagataacagttctgaaataaataccactcacaacctggatgaaaatgaactcaagacagagcacacagatggtaagaatatctccatggaggatgacgtcggggaaagcagccagtccagttacgacgaccccagcatgatgcaactgtacaatgaaacaaaccgacaactcacacttttgcacagcagcaccaactcccggcagacggcccctgacagtctcgacttgtggaacagagtgattttggaggatactcagtccactgcaacgatctcagatatggacaatgatttggactgggatgactgcagtgggggtgcggcaatccccagtgatggtcaaacagaaggatacatggctgaaggttccgagccggaaacccgatttacagtgagacagctggaaccctggggcttggagtatcaggaagcaaatcaggtagattgggagctccctgcctctgatgagcataccaaggacagtgctcccagtgaacatcacacattgaatgagaaaagtgggcagctaattgcaaacagtatttgggattctgtcatgagagataaagacatgtcatcattcatgttaccaggctcctcacatatcacagattcagagcaaagggaattgcctcctgaaatccccagccattcagcaaatgttaaagacactcattccccagatgcgccagcagcctctggaaccagtgaatcagaggcacttatatctcatcttgacaagcaggacacagagagggaaaccctgcaaagtgatgcagcatccttggcgactaggcttgagaatccagggtattttccacacccagatccatggaaaggtcatggcgatggacaaagtgaaagtgagaaggaagcccagggagccactgacagggggcaccttgatgaagaggaggtgatcgcctctggtgtggagaatgcctcagggatttctgaaaaagggcagagtgaccaggaactgtcttctctggttgcatctgaacatcaggaaatctgcattaaatcaggcaaaatcagctctcttgctgtcactttcagtcctcaaaccgaggaaccagaggaagttttagagtatgaggaggggtcttacaatctagactcccgtgatgtgcaaacagggatgtccgcagataacctgcagccaaaagatacccatgaaaaacacctcatgagtcaaagaaattcaggtgaaactactgagacttcagatgggatgaatttcacaaaatatgtatctgtacctgaaaaggatcttgagaaaactgaagaatgtaactttctagagccagagaacgtgggtggagggccacctcacagagttccccgaagtcttgattttggggacgtccctatagacagtgatgtgcatgtcagcagcacatgttctgagataaccaaaaatcttgacgttaaggggtctgaaaatagccttccaggagccggttcgtctggaaattttgacagagatactatttctagtgagtatactcattcaagtgcatcaagtcctgagttaaatgactcttcagttgcactgtcctcctggggccagcaacccagttctgggtatcaagaagaaaaccaaggcaactggagtgaacagaatcaccaagaatctgaactaattaccactgatggccaagtagaaatagttaccaaagtgaaggatttagagaaaaacagaataaatgagtttgaaaagagctttgatcgcaaaactcctacatttttagagatctggaatgactcagttgatggtgattccttttcctctttatccagtcctgaaacaggcaaatattctgaacattcagggacacatcaggaaagcaatctaattgctagctaccaggagaaaaatgaacatgacatttctgcaactgtgcaatcagaggatgccagggtcatttcaacaagctcaggttctgatgatgacagtgtcggtggtgaagagtcaatagaggaagagatccaggtggccaactgccacgttgctgaggatgaatccagagcttgggattcattgaatgaatctaataagttcttggtcacagctgatcctaagtctgaaaatatttatgactacctagacagctcagagccagcagagaatgagaataagtcaaacccattctgtgacaatcaacaaagcagccctgatccctggactttctcaccattaacggagactgaaatgcagattacagcagtggagaaggagaagagatcttctccagaaacagggacaacaggagatgttgcatggcaaatatctcccaaagcttcgttcccaaagaacgaagataattctcaactggaaatgctgggcttctcagctgatagcactgagtggtggaaggcctcaccccaggaagggagactaattgaaagtccatttgaaagggagctgtctgactccagtggtgtgttggagataaattcttcagtacaccaaaatgccagtccctggggagtaccagttcagggtgatattgagcccgtggaaacacactatactaatccttttagtgacaaccatcagtcaccctttctggaaggtaatgggaagaactcccatgagcaactctggaacattcaaccaaggcagccagacccagatgctgacaagttcagccagcttgtaaaattagaccaaattaaagaaaaggactcaagagagcaaacctttgtgtctgctgctggtgatgagctgactcctgaaacacctacccaagagcagtgtcaggacaccatgctgccagtctgtgatcatccggacacagcctttactcacgcagaggaaaatagttgtgttacatctaatgtttcaactaatgaaggtcaagaaacaaatcagtgggaacaagaaaaatcatacctaggtgagatgacaaattcaagcattgccacagaaaattttcctgctgtcagttctcccacccaactgataatgaagccaggctctgaatgggatggctctaccccaagtgaggactcccgaggtacctttgtgccagatattttacatggcaactttcaagagggtgggcagctggcctctgccgcgcctgacttgtggatagatgctaagaagcccttcagtttgaaagcagatggtgagaatcctgatatcctgacgcactgcgaacatgacagcaattctcaggcttccgacagccctgatatatgtcacgattctgaagcaaagcaagagactgagaagcacctcagtgcttgcatgggacctgaagtggaatccagtgagctttgtctcactgagccagagatagatgaagaacccatttatgagcctggacgggagtttgtcccatccaatgcagaactcgattctgaaaacgcaactgtgctgcctccaattggctatcaagcagacataaagggctcctctcagcccgcctctcataaaggttcacctgaaccttctgaaataaacggtgacaacagtacaggtttacaagtatcagaaaaaggagccagcccagatatggcaccaattttggaaccagttgacagaagaatcccaaggattgaaaatgtggcaactagcatttttgtaactcaccaagagccaactccagaaggtgacggttcttggatatcagacagcttttctcctgaaagtcagcctggtgcaagagctttgtttgatggtgatccacatttatccacagagaatcctgccttggttcctgatgctttgctagcctcagacacttgtctggatataagcgaagctgcctttgaccacagtttcagcgatgcctcaggtctcaacacatccacgggaacaatagatgacatgagtaaactgacattatccgaaggccatccggaaacgccagttgatggggacctagggaagcaagatatctgctcatctgaagcctcgtggggtgattttgaatatgatgtaatgggccagaatatcgatgaagatttactgagagagcctgaacacttcctgtatggtggtgaccctcctttggaggaagattctctgaagcagtcgctggcaccgtacacacctccctttgatttgtcttatctcacagaacctgcccagagtgctgaaacaatagaggaagctgggtctccagaggatgaatctctgggatgcagagcagcagagatagtgctttctgcacttcctgatcgaagaagtgagggaaaccaggctgagaccaaaaacagactgcctggatcccagctggctgtgctgcatattcgtgaagaccctgagtccgtttatttgccggtaggagcaggctccaacattttgtctccatcaaacgttgactgggaagtagaaacagataattctgatttaccagcaggtggagacataggaccaccaaatggtgccagcaaggaaataccagaattggaagaagaaaaaacaattcctaccaaagagcctgagcagataaaatcagaatacaaggaagaaagatgcacagagaagaatgaagatcgtcatgcactacacatggattacatacttgtaaaccgtgaagaaaattcacactcaaagccagagacctgtgaagaaagagaaagcatagctgaattagaattgtatgtaggttccaaagaaacagggctgcagggaactcagttagcaagcttcccagacacatgtcagccagcctccttaaatgaaagaaaaggtctctctgcagagaaaatgtcttctaaaggcgatacgagatcatcttttgaaagccctgcacaagaccagagttggatgttcttgggccatagtgaggttggtgatccatcactggatgccagggactcagggcctgggtggtctggcaagactgtggagccgttctctgaactcggcttgggtgagggtccccagctgcagattctggaagaaatgaagcctctagaatctttagcactagaggaagcctctggtccagtcagccaatcacagaagagtaagagccgaggcagggctggcccggatgcagttacccatgacagtgaatgggaaatgctttcaccacagcctgttcagaaaaacatgatctctgacacggaaatggaggaggagacagagttccttgagctcggaaccaggatatcaagaccaaatggactactgtcagaggatgtaggaatggacatcccctttgaagagggcgtgctgagtcccagtgctgcagacatgaggcctgaacctcctaattctctggatcttaatgacactcatcctcggagaatcaagctcacagccccaaatatcaatctttctctggaccaaagtgaaggatctattctctctgatgataacttggacagtccagatgaaattgacatcaatgtggatgaacttgatacccccgatgaagcagattcttttgagtacactggccatgatcccacagccaacaaagattctggccaagagtcagagtctattccagaatatacggccgaagaggaacgggaggacaaccggctttggaggacagtggtcattggagaacaagagcagcgcattgacatgaaggtcatcgagccctacaggagagtcatttctcacggaggatactatggggacggtctaaatgccatcattgtgtttgccgcctgttttctgccagacagcagtcgggcggattaccactatgtcatggaaaatcttttcctatatgtaataagtactttagagttgatggtagctgaagactatatgattgtgtacttgaatggtgcaaccccaagaaggaggatgccagggctaggctggatgaagaaatgctaccagatgattgacagacggttgaggaagaatttgaaatcattcatcattgttcatccatcttggttcatcagaacaatccttgctgtgacacgaccttttataagttcaaaattcagcagtaaaattaaatatgtcaatagcttatcagaactcagtgggctgatcccaatggattgcatccacattccagagagcatcatcaaactggatgaagaactgagggaagcatcagaggcagctaaaactagctgcctttacaatgatccagaaatgtcttctatggagaaggatattgacttgaagctgaaagaaaagccttagttggccatgctggaagaagaggatgcttttctggttcatggttctgttgaaacatatctacctgaaagagacagggctgatgttacctttttccactttgcactacctggtgccattctaaatttctaaggggaaaaatagaaagtttgtttactcttaagatattttatgaaattgtgtgtactttcctattttgccaattatgtgcctcaaagattttagttgagccttagcaagaaagtaggaccttccatttcaatacttcattaacacggtgtagtgatactttgtcccttagactggtgtttaccagtaagatacctttaatccactgttaagtatgagtggatttgtttccatagattagctggatttccttttggtgattgcattaggtttaaagtacacaggtctcaactctccccaggaaagtttcccctgtttgactccacctttaaaatcctaagcctgactaggacagccacaaaccacacaaggtgtaaaaccatcatcagctaagtgcccgttttgttcttgtttaccagaatctcctttaacttctcaaagggaagccgggctttctaatccacgtcaactttattttagttgtcaaattgggcattatattttatgtaaattggtcttttaacatcattttcctgatgaatgttggtgaccaccacattgtgaaatttaagaatccgtgttgcatgtttggtagctctctgagtttcaggccataaactcagctccagaggttaccttttaagtgccaagaactcaagtgcaaggtggcctactcaaaaatcatttggtagcattcagttattcatgaattcctctctcgcatgcattataaaaagtgatctgctttaaaacaccgtaatctgatcataggcttaaaattaaatatgagtattactttcatgtacaaaatatttcctttatagtcttcatatgccctttaaaatgccaacaagatttcaagtctgtaggcctctagtgaggtggggtggcaaaccacagctaagtctcgctcaccactgcaagctaagaatggtttttacattttgggttggaaaaattttttttgaatatttcatgacacatgaaaattattcaaatgttagtgccgataaataaagtggtactgaaacacagccacacaaacttgtttttgtactgtctacagctactttcacactacagccgcagagctgagcagttcagcagaccgtatgtcccacaatgcctaaaacattgactatgtttacagaaaaagtttgctgacccctgctctagcaaacgcatcctttcctactccaccccaatttgtatttagatagtttctctaacagaacggacaaatgaggctgcaaactaatttatttttgtcaaaaatcaatgttttgacatccacagacagtgaaataaaagaaatggcttgctgaaaaacatgaggagtcctagccacaaaatcactgcttaggttgcaattgccaaaatgaagccttcttagaagcacttctttagtatatacaggtgttggctgaagtccgtgcctcactctgggaaccattcttagtctccagtgtctcctattacaaagaagctggcagaaataaaaatgaaggggtgagagcggttccaccctagtctcatggtggaaaattcattggggagagctgtccaggatatttggagtcctgggtagaaggagcttgtaactactttaaagtcgacatctttgcacaggtgattgagtttctctgacctcattgcttcacctctgtctcctcccgtccttccgcacgtgcccacacacacgcagttcagccctctttcctccataagcctccatcgttttctcttttctcctcttgatcctttcaagcgagtatcttgttgaattgtatgttctgttggatctcctccttcataacatctggcttgttggacagaaaaaccctacagcccaccccctcccacagcccacctccacttttgaaagcccaaattacacctctcccagaacacagtgttgacgtaaatacagttacccaatattcctgtttgttcacctatttgctactttcactcagtagcatcccattttgtaaaatgaattccatggtcaccctgtcacaggaagtaatgaaaaatccagtgttcagtgtagtggtgcaaacctgagggcatagagctgttcatagagggctcttgttatagccaaacagacacagcaacaatctcaccatttatatatatatttttaacttgtccagctcatctatggaaaactactcaggtggtatgctgtttgaagcctcatcttcctacatgaaaattatgggcatttgtcccaatgattttgtttcagctgttctgtaggctgcataaccactctgatatttaggtatctgctattttattatcttaaaagacaaattaatttaattgcatgtgctagggaaaagctaccatgtacattcaccccaagtaaatagaatcctagatgaatcctagaaaaataatccctaagcagataggtagacagaggtaaacattcacatgatttagctctctagctcttgcactctgaacattcttgctttggttctgacttctgggaactgctttgcatttctcctatagatctgtagttaagggaaccaaggggtcattggggcaaaagcattgtttctcaaagctccttgattaagagaaagaacagaaatttgcacagaagatagtgtcaaggagtgagaaagtttgtttgagggcagtagctcagtgtggaagaaaatcctgaagtttctgttgaagccatacaatgttctatggggttactctctaagacattctctgaggtgtgtgaggaagtcactactcctagcctttgttaagatgtaattttaaatattcagttatggtactatgtttgcaactctcgtcttatcacaatgcctcagtagtttgttcccttagaaacatttagatgtgcacaaattaatcttttatatatctaaaggtttttctatcatgcattggattgctcagaataaagtgtctgttagacttcgttttggtaaataaattctccataatgtagattaataatataaaagtctttaatgacacaa

SEQ ID NO: 350 - DNA, 5190 bp, Homo sapiens
tctgggggctcggctttgccgcgctcgctgcacttgggcgagagctggaacgtggaccagagctcggatcccatcgcagctaccgcgatgagaggcgctcgcggcgcctgggattttctctgcgttctgctcctactgcttcgcgtccagacaggctcttctcaaccatctgtgagtccaggggaaccgtctccaccatccatccatccaggaaaatcagacttaatagtccgcgtgggcgacgagattaggctgttatgcactgatccgggctttgtcaaatggacttttgagatcctggatgaaacgaatgagaataagcagaatgaatggatcacggaaaaggcagaagccaccaacaccggcaaatacacgtgcaccaacaaacacggcttaagcaattccatttatgtgtttgttagagatcctgccaagcttttccttgttgaccgctccttgtatgggaaagaagacaacgacacgctggtccgctgtcctctcacagacccagaagtgaccaattattccctcaaggggtgccaggggaagcctcttcccaaggacttgaggtttattcctgaccccaaggcgggcatcatgatcaaaagtgtgaaacgcgcctaccatcggctctgtctgcattgttctgtggaccaggagggcaagtcagtgctgtcggaaaaattcatcctgaaagtgaggccagccttcaaagctgtgcctgttgtgtctgtgtccaaagcaagctatcttcttagggaaggggaagaattcacagtgacgtgcacaataaaagatgtgtctagttctgtgtactcaacgtggaaaagagaaaacagtcagactaaactacaggagaaatataatagctggcatcacggtgacttcaattatgaacgtcaggcaacgttgactatcagttcagcgagagttaatgattctggagtgttcatgtgttatgccaataatacttttggatcagcaaatgtcacaacaaccttggaagtagtagataaaggattcattaatatcttccccatgataaacactacagtatttgtaaacgatggagaaaatgtagatttgattgttgaatatgaagcattccccaaacctgaacaccagcagtggatctatatgaacagaaccttcactgataaatgggaagattatcccaagtctgagaatgaaagtaatatcagatacgtaagtgaacttcatctaacgagattaaaaggcaccgaaggaggcacttacacattcctagtgtccaattctgacgtcaatgctgccatagcatttaatgtttatgtgaatacaaaaccagaaatcctgacttacgacaggctcgtgaatggcatgctccaatgtgtggcagcaggattcccagagcccacaatagattggtatttttgtccaggaactgagcagagatgctctgcttctgtactgccagtggatgtgcagacactaaactcatctgggccaccgtttggaaagctagtggttcagagttctatagattctagtgcattcaagcacaatggcacggttgaatgtaaggcttacaacgatgtgggcaagacttctgcctattttaactttgcatttaaaggtaacaacaaagagcaaatccatccccacaccctgttcactcctttgctgattggtttcgtaatcgtagctggcatgatgtgcattattgtgatgattctgacctacaaatatttacagaaacccatgtatgaagtacagtggaaggttgttgaggagataaatggaaacaattatgtttacatagacccaacacaacttccttatgatcacaaatgggagtttcccagaaacaggctgagttttgggaaaaccctgggtgctggagctttcgggaaggttgttgaggcaactgcttatggcttaattaagtcagatgcggccatgactgtcgctgtaaagatgctcaagccgagtgcccatttgacagaacgggaagccctcatgtctgaactcaaagtcctgagttaccttggtaatcacatgaatattgtgaatctacttggagcctgcaccattggagggcccaccctggtcattacagaatattgttgctatggtgatcttttgaattttttgagaagaaaacgtgattcatttatttgttcaaagcaggaagatcatgcagaagctgcactttataagaatcttctgcattcaaaggagtcttcctgcagcgatagtactaatgagtacatggacatgaaacctggagtttcttatgttgtcccaaccaaggccgacaaaaggagatctgtgagaataggctcatacatagaaagagatgtgactcccgccatcatggaggatgacgagttggccctagacttagaagacttgctgagcttttcttaccaggtggcaaagggcatggctttcctcgcctccaagaattgtattcacagagacttggcagccagaaatatcctccttactcatggtcggatcacaaagatttgtgattttggtctagccagagacatcaagaatgattctaattatgtggttaaaggaaacgctcgactacctgtgaagtggatggcacctgaaagcattttcaactgtgtatacacgtttgaaagtgacgtctggtcctatgggatttttctttgggagctgttctctttaggaagcagcccctatcctggaatgccggtcgattctaagttctacaagatgatcaaggaaggcttccggatgctcagccctgaacacgcacctgctgaaatgtatgacataatgaagacttgctgggatgcagatcccctaaaaagaccaacattcaagcaaattgttcagctaattgagaagcagatttcagagagcaccaatcatatttactccaacttagcaaactgcagccccaaccgacagaagcccgtggtagaccattctgtgcggatcaattctgtcggcagcaccgcttcctcctcccagcctctgcttgtgcacgacgatgtctgagcagaatcagtgtttgggtcacccctccaggaatgatctcttcttttggcttccatgatggttattttcttttctttcaacttgcatccaactccaggatagtgggcaccccactgcaatcctgtctttctgagcacactttagtggccgatgatttttgtcatcagccaccatcctattgcaaaggttccaactgtatatattcccaatagcaacgtagcttctaccatgaacagaaaacattctgatttggaaaaagagagggaggtatggactgggggccagagtcctttccaaggcttctccaattctgcccaaaaatatggttgatagtttacctgaataaatggtagtaatcacagttggccttcagaaccatccatagtagtatgatgatacaagattagaagctgaaaacctaagtcctttatgtggaaaacagaacatcattagaacaaaggacagagtatgaacacctgggcttaagaaatctagtatttcatgctgggaatgagacataggccatgaaaaaaatgatccccaagtgtgaacaaaagatgctcttctgtggaccactgcatgagcttttatactaccgacctggtttttaaatagagtttgctattagagcattgaattggagagaaggcctccctagccagcacttgtatatacgcatctataaattgtccgtgttcatacatttgaggggaaaacaccataaggtttcgtttctgtatacaaccctggcattatgtccactgtgtatagaagtagattaagagccatataagtttgaaggaaacagttaataccattttttaaggaaacaatataaccacaaagcacagtttgaacaaaatctcctcttttagctgatgaacttattctgtagattctgtggaacaagcctatcagcttcagaatggcattgtactcaatggatttgatgctgtttgacaaagttactgattcactgcatggctcccacaggagtgggaaaacactgccatcttagtttggattcttatgtagcaggaaataaagtataggtttagcctccttcgcaggcatgtcctggacaccgggccagtatctatatatgtgtatgtacgtttgtatgtgtgtagacaaatatttggaggggtatttttgccctgagtccaagagggtcctttagtacctgaaaagtaacttggctttcattattagtactgctcttgtttcttttcacatagctgtctagagtagcttaccagaagcttccatagtggtgcagaggaagtggaaggcatcagtccctatgtatttgcagttcacctgcacttaaggcactctgttatttagactcatcttactgtacctgttccttagaccttccataatgctactgtctcactgaaacatttaaattttaccctttagactgtagcctggatattattcttgtagtttacctctttaaaaacaaaacaaaacaaaacaaaaaactccccttcctcactgcccaatataaaaggcaaatgtgtacatggcagagtttgtgtgttgtcttgaaagattcaggtatgttgcctttatggtttcccccttctacatttcttagactacatttagagaactgtggccgttatctggaagtaaccatttgcactggagttctatgctctcgcacctttccaaagttaacagattttggggttgtgttgtcacccaagagattgttgtttgccatactttgtctgaaaaattcctttgtgtttctattgacttcaatgatagtaagaaaagtggttgttagttatagatgtctaggtacttcaggggcacttcattgagagttttgtcttggatattcttgaaagtttatatttttataattttttcttacatcagatgtttctttgcagtggcttaatgtttgaaattattttgtggctttttttgtaaatattgaaatgtagcaataatgtcttttgaatattcccaagcccatgagtccttgaaaatattttttatatatacagtaactttatgtgtaaatacataagcggcgtaagtttaaaggatgttggtgttccacgtgttttattcctgtatgttgtccaattgttgacagttctgaagaattctaataaaatgtacatatataaatcaaaaaaaaaaaaaaaa

SEQ ID NO: 351 - DNA, 2559 bp, Homo sapiens
actctacccactcaggttgcccagagagcactttaggttctgactcgcgtggggcgcgaggtaccccgtggggcagctaggtgcctccaagaaaccccgccccagaggacccgcacgagttgctgccatttttcgctgaagcccctgccctggggctggtgttcttctctatgattctaccaatcgtcggcatttttttcctcccttctttctttttaggaaggcgctggggtgtgcggcggcaacggcggcggtgaagggatcctcttgtggtatctcctcgtgggttcctgtcttgaaggatttcttctccgcctcaactttatgttcaagtagcgctttgggggttgggttggttttcatagcccccacccccggccctctccttttaaagggtgtgtggagttcagaggatgggtggagagcgggcttggccggaactgaattggtagaggtaaaaggggaacggaggaccttaagctctggccacttcggcccagcgaacccactttatttttgtccaaggaaaagctgcaggggggaggattctttttaggaagtctactctgccggcccctgatttttgggttggatgcttgagagctttgtttcccttgttccgagagtggcccagctgggtctgaatcgactccctcccctttcgaccccctcctcattttccagcccggagaaataggggagtgggggcccaagaacgagaagacgagaacgcgtcgccctgcgctatgtcagaatggggcgggtgtgaggggaacagctctcttgcgatcagctcaggagtatgagcctcccggaggacggcatgagttctggacacttcaggagtcctcagctagtgacatggtcgatatggataaactcataaacaacttggaggtccaacttaattcagaaggtggctcaatgcaggtattcaagcaggtcactgcttctgttcggaacagagatccccctgagatagaatacagaagtaatatgacttctccaacactcctggatgccaaccccatggagaacccagcactgtttaatgacatcaagattgagcccccagaagaacttttggctagtgatttcagcctgccccaagtggaaccagttgacctctcctttcacaagcccaaggctcctctccagcctgctagcatgctacaagctccaatacgtccccccaagccacagtcttctccccagacccttgtggtgtccacgtcaacatctgacatgagcacttcagcaaacattcctactgttctgaccccaggctctgtcctgacctcctctcagagcactggtagccagcagatcttacatgtcattcacactatcccctcagtcagtctgccaaataagatgggtggcctgaagaccatcccagtggtagtgcagtctctgcccatggtgtatactactttgcctgcagatgggggccctgcagccattacagtcccactcattggaggagatggtaaaaatgctggatcagtgaaagttgaccccacctccatgtctccactggaaattccaagtgacagtgaggagagtacaattgagagtggatcctcagccttgcagagtctgcagggactacagcaagaaccagcagcaatggcccaaatgcagggagaagagtcgcttgacttgaagagaagacggattcaccaatgtgactttgcaggatgcagcaaagtgtacaccaaaagctctcacctgaaagctcaccgcagaatccatacaggagagaagccttataaatgcacctgggatggctgctcctggaaatttgctcgctcagatgagctcactcgccatttccgcaagcacacaggcatcaagccttttcggtgcacagactgcaaccgcagcttttctcgttctgaccacctgtccctgcatcgccgtcgccatgacaccatgtgagccgcacaggtcacactagagaagctgcgctggtatctttcctggtcgtgtgctgaggttgggacaattttttcctctttgacttcagcttgcatatggggttgaagcagcccactgagccaagttgaggagactggaggaaaagagagctggtctcccgtggggctcttcatattctaccttcacttctccactgtccagacccgtttttttcaacctccacatgggttgaattccagtgtggcacccatggctgccttcccatccccccctgctctgaaataggacatttttcctacagtaacaaaacaggaatcaaactcaaggctgtgaacaaacatacgctgctttattctttccaatttttctcttgttttctagaactcttatccatatgtttttaaaataagtacctaaaagtggtttgatagtgtcctaaacgacttttttaacttcctaaatggaaagagcataacaatgtagttgattggtaagatttacagggatttggtttctgagtttgaggcacattcccagtgaataagctgagtcccataccacactcaaaaggttttaataaatctaatcctatttcttcttaaaaaaaaaaaaaaaaaa

SEQ ID NO: 352 - DNA, 2252 bp, Homo sapiens
agaacagcttgaagaccgttcatttttaagtgacaagagactcacctccaagaagcaattgtgttttcagaatgattttattcaagcaagcaacttatttcatttccttgtttgctacagtttcctgtggatgtctgactcaactctatgaaaacgccttcttcagaggtggggatgtagcttccatgtacaccccaaatgcccaatactgccagatgaggtgcacattccacccaaggtgtttgctattcagttttcttccagcaagttcaatcaatgacatggagaaaaggtttggttgcttcttgaaagatagtgttacaggaaccctgccaaaagtacatcgaacaggtgcagtttctggacattccttgaagcaatgtggtcatcaaataagtgcttgccatcgagacatttataaaggagttgatatgagaggagtcaattttaatgtgtctaaggttagcagtgttgaagaatgccaaaaaaggtgcaccagtaacattcgctgccagtttttttcatatgccacgcaaacatttcacaaggcagagtaccggaacaattgcctattaaagtacagtcccggaggaacacctaccgctataaaggtgctgagtaacgtggaatctggattctcactgaagccctgtgccctttcagaaattggttgccacatgaacatcttccagcatcttgcgttctcagatgtggatgttgccagggttctcactccagatgcttttgtgtgtcggaccatctgcacctatcaccccaactgcctcttctttacattctatacaaatgtatggaaaatcgagtcacaaagaaatgtttgtcttcttaaaacatctgaaagtggcacaccaagttcctctactcctcaagaaaacaccatatctggatatagccttttaacctgcaaaagaactttacctgaaccctgccattctaaaatttacccgggagttgactttggaggagaagaattgaatgtgacttttgttaaaggagtgaatgtttgccaagagacttgcacaaagatgattcgctgtcagtttttcacttattctttactcccagaagactgtaaggaagagaagtgtaagtgtttcttaagattatctatggatggttctccaactaggattgcgtatgggacacaagggagctctggttactctttgagattgtgtaacactggggacaactctgtctgcacaacaaaaacaagcacacgcattgttggaggaacaaactcttcttggggagagtggccctggcaggtgagcctgcaggtgaagctgacagctcagaggcacctgtgtggagggtcactcataggacaccagtgggtcctcactgctgcccactgctttgatgggcttcccctgcaggatgtttggcgcatctatagtggcattttaaatctgtcagacattacaaaagatacacctttctcacaaataaaagagattattattcaccaaaactataaagtctcagaagggaatcatgatatcgccttgataaaactccaggctcctttgaattacactgaattccaaaaaccaatatgcctaccttccaaaggtgacacaagcacaatttataccaactgttgggtaaccggatggggcttctcgaaggagaaaggtgaaatccaaaatattctacaaaaggtaaatattcctttggtaacaaatgaagaatgccagaaaagatatcaagattataaaataacccaacggatggtctgtgctggctataaagaagggggaaaagatgcttgtaagggagattcaggtggtcccttagtttgcaaacacaatggaatgtggcgtttggtgggcatcaccagctggggtgaaggctgtgcccgcagggagcaacctggtgtctacaccaaagtcgctgagtacatggactggattttagagaaaacacagagcagtgatggaaaagctcagatgcagtcaccagcatgagaagcagtccagagtctaggcaatttttacaacctgagttcaagtcaaattctgagcctggggggtcctcatctgcaaagcatggagagtggcatcttctttgcatcctaaggacgaaaaacacagtgcactcagagctgctgaggacaatgtctggctgaagcccgctttcagcacgccgtaaccaggggctgacaatgcgaggtcgcaactgagatctccatgactgtgtgttgtgaaataaaatggtgaaagatcaaaaaa

SEQ ID NO: 353 - DNA, 1992 bp, Homo sapiens
agttgtggccaccttccccaggccatggatctctccaacaacaccatgtcactctcagtgcgcacccccggactgtcccggcggctctcctcgcagagtgtgataggcagacccaggggcatgtctgcttccagtgttggaagtggttatgggggaagtgcctttggctttggagccagctgtgggggaggcttttctgctgcttccatgtttggttctagttccggctttgggggtggctccggaagttccatggcaggaggactgggtgctggttatgggagagccctgggtggaggtagctttggagggctggggatgggatttgggggcagcccaggaggtggctctctaggtattctctcgggcaatgatggaggccttctttctggatcagaaaaagaaactatgcaaaatcttaatgatagattagcttcctacctggataaggtgcgagctctagaagaggctaatactgagctagaaaataaaattcgagaatggtatgaaacacgaggaactgggactgcagatgcttcacagagcgattacagcaaatattatccactgattgaagacctcaggaataagatcatttcagccagcattggaaatgcccagctcctcttgcagattgacaatgcgagactagctgctgaggacttcaggatgaagtatgagaatgaactggccctgcgccagggcgtagaggccgacatcaatggcctgcgccgggtgctggacgagctgaccctgaccaggaccgacctggagatgcagatcgagagcctgaacgaggagctggcctacatgaagaagaaccacgaggatgagctccaaagcttccgggtgggcggcccaggcgaggtcagcgtagaaatggacgctgcccccggagtggacctcaccaggctcctcaatgatatgcgggcgcagtatgaaaccatcgctgagcagaatcggaaggacgctgaagcctggttcattgaaaagagcggggagctccgtaaggagattagcaccaacaccgagcagcttcagtccagcaagagcgaggtcaccgacctgcgtcgcgcctttcagaacctggagatcgagctacagtcccagctcgccatgaagaaatccctggaggactccttggccgaagccgagggcgattactgcgcgcagctgtcccaggtgcagcagctcatcagcaacctggaggcacagctgctccaggtgcgcgcggacgcagagcgccagaacgtggaccaccagcggctgctgaatgtcaaggcccgcctggagctggagattgagacctaccgccgcctgctggacggggaggcccaaggtgatggtttggaggaaagtttatttgtgacagactccaaatcacaagcacagtcaactgattcctctaaagacccaaccaaaacccgaaaaatcaagacagttgtgcaggagatggtgaatggtgaggtggtctcatctcaagttcaggaaattgaagaactaatgtaaaatttcacaagatctgccccatgattggttccttaggaacaagaaatttacaagtagaaattattcctttcagagtaacatgctgtattacttcaatccctatttttgtctgttccattttctttggattccctattcacattgaatcctttttgcccttctgaaacaatattcagtcacaagtcattttggtcatgttggtctttgtaacaaatcaaaattaccttatatccttctggacctggagtagtcttttaacgaactttcttctggtaacccggaatattttttaatcatagagctttaatcaagtagtattgttttaatagagttaattgtaataaaagatgaatggtaataatgtgaaatgtatgccttgattccaacaagaatgtcaagagcatagagagaagtttttgaaatactactaataaaatagaggctgggagtaatgactcacacctataatcccagcactttggg

SEQ ID NO: 354 - DNA, 7889 bp, Homo sapiens
gtgcaggctgctcccggggtaggtgagggaagcgcggaggcggcgcgcgggggcagtggtcggcgagcagcgcggtcctcgctaggggcgcccacccgtcagtctctccggcgcgagccgccgccaccgcccgcgccggagtcaggcccctgggcccccaggctcaagcagcgaagcggcctccgggggacgccgctaggcgagaggaacgcgccggtgcccttgccttcgccgtgacccagcgtgcgggcggcgggatgagagggagccatcgggccgcgccggccctgcggccccgggggcggctctggcccgtgctggccgtgctggcggcggccgccgcggcgggctgtgcccaggcagccatggacgagtgcacggacgagggcgggcggccgcagcgctgcatgcccgagttcgtcaacgccgccttcaacgtgactgtggtggccaccaacacgtgtgggactccgcccgaggaatactgtgtgcagaccggggtgaccggggtcaccaagtcctgtcacctgtgcgacgccgggcagccccacctgcagcacggggcagccttcctgaccgactacaacaaccaggccgacaccacctggtggcaaagccagaccatgctggccggggtgcagtaccccagctccatcaacctcacgctgcacctgggaaaagcttttgacatcacctatgtgcgtctcaagttccacaccagccgcccggagagctttgccatttacaagcgcacacgggaagacgggccctggattccttaccagtactacagtggttcctgtgagaacacctactccaaggcaaaccgcggcttcatcaggacaggaggggacgagcagcaggccttgtgtactgatgaattcagtgacatttctcccctcactgggggcaacgtggccttttctaccctggaaggaaggcccagcgcctataactttgacaatagccctgtgctgcaggaatgggtaactgccactgacatcagagtaactcttaatcgcctgaacacttttggagatgaagtgtttaacgatcccaaagttctcaagtcctattattatgccatctctgattttgctgtaggtggcagatgtaaatgtaatggacacgcaagcgagtgtatgaagaacgaatttgataagctggtgtgtaattgcaaacataacacatatggagtagactgtgaaaagtgtcttcctttcttcaatgaccggccgtggaggagggcaactgcggaaagtgccagtgaatgcctgccctgtgattgcaatggtcgatcccaggaatgctacttcgaccctgaactctatcgttccactggccatgggggccactgtaccaactgccaggataacacagatggcgcccactgtgagaggtgccgagagaacttcttccgccttggcaacaatgaagcctgctcttcatgccactgtagtcctgtgggctctctaagcacacagtgtgatagttacggcagatgcagctgtaagccaggagtgatgggggacaaatgtgaccgttgccagcctggattccattctctcactgaagcaggatgcaggccatgctcttgtgatccctctggcagcatagatgaatgtaatattgaaacaggaagatgtgtttgcaaagacaatgtcgaaggcttcaattgtgaaagatgcaaacctggattttttaatctggaatcatctaatcctcggggttgcacaccctgcttctgctttgggcattcttctgtctgtacaaacgctgttggctacagtgtttattctatctcctctacctttcagattgatgaggatgggtggcgtgcggaacagagagatggctctgaagcatctctcgagtggtcctctgagaggcaagatatcgccgtgatctcagacagctactttcctcggtacttcattgctcctgcaaagttcttgggcaagcaggtgttgagttatggtcagaacctctccttctcctttcgagtggacaggcgagatactcgcctctctgcagaagaccttgtgcttgagggagctggcttaagagtatctgtacccttgatcgctcagggcaattcctatccaagtgagaccactgtgaagtatgtcttcaggctccatgaagcaacagattacccttggaggcctgctcttaccccttttgaatttcagaagctcctaaacaacttgacctctatcaagatacgtgggacatacagtgagagaagtgctggatatttggatgatgtcaccctggcaagtgctcgtcctgggcctggagtccctgcaacttgggtggagtcctgcacctgtcctgtgggatatggagggcagttttgtgagatgtgcctctcaggttacagaagagaaactcctaatcttggaccatacagtccatgtgtgctttgcgcctgcaatggacacagcgagacctgtgatcctgagacaggtgtttgtaactgcagagacaatacggctggcccgcactgtgagaagtgcagtgatgggtactatggagattcaactgcaggcacctcctccgattgccaaccctgtccgtgtcctggaggttcaagttgtgctgttgttcccaagacaaaggaggtggtgtgcaccaactgtcctactggcaccactggtaagagatgtgagctctgtgatgatggctactttggagaccccctgggtagaaacggccctgtgagactttgccgcctgtgccagtgcagtgacaacatcgatcccaatgcagttggaaattgcaatcgcttgacgggagaatgcctgaagtgcatctataacactgctggcttctattgtgaccggtgcaaagacggattttttggaaatcccctggctcccaatccagcagacaaatgcaaagcctgcaattgcaatctgtatgggaccatgaagcagcagagcagctgtaaccccgtgacggggcagtgtgaatgtttgcctcacgtgactggccaggactgtggtgcttgtgaccctggattctacaatctgcagagtgggcaaggctgtgagaggtgtgactgccatgccttgggctccaccaatgggcagtgtgacatccgcaccggccagtgtgagtgccagcccggcatcactggtcagcactgtgagcgctgtgaggtcaaccactttgggtttggacctgaaggctgcaaaccctgtgactgtcatcctgagggatctctttcacttcagtgcaaagatgatggtcgctgtgaatgcagagaaggctttgtgggaaatcgctgtgaccagtgtgaagaaaactatttctacaatcggtcttggcctggctgccaggaatgtccagcttgttaccggctggtaaaggataaggttgctgatcatagagtgaagctccaggaattagagagtctcatagcaaaccttggaactggggatgagatggtgacagatcaagccttcgaggatagactaaaggaagcagagagggaagttatggacctccttcgtgaggcccaggatgtcaaagatgttgaccagaatttgatggatcgcctacagagagtgaataacactctgtccagccaaattagccgtttacagaatatccggaataccattgaagagactggaaacttggctgaacaagcgcgtgcccatgtagagaacacagagcggttgattgaaatcgcatccagagaacttgagaaagcaaaagtcgctgctgccaatgtgtcagtcactcagccagaatctacaggggacccaaacaacatgactcttttggcagaagaggctcgaaagcttgctgaacgtcataaacaggaagctgatgacattgttcgagtggcaaagacagccaatgatacgtcaactgaggcatacaacctgcttctgaggacactggcaggagaaaatcaaacagcatttgagattgaagagcttaataggaagtatgaacaagcgaagaacatctcacaggatctggaaaaacaagctgcccgagtacatgaggaggccaaaagggccggtgacaaagctgtggagatctatgccagcgtggctcagctgagccctttggactctgagacactggagaatgaagcaaataacataaagatggaagctgagaatctggaacaactgattgaccagaaattaaaagattatgaggacctcagagaagatatgagagggaaggaacttgaagtcaagaaccttctggagaaaggcaagactgaacagcagaccgcagaccaactcctagcccgagctgatgctgccaaggccctcgctgaagaagctgcaaagaagggacgggataccttacaagaagctaatgacattctcaacaacctgaaagattttgataggcgtgtgaacgataacaagacggccgcagaggaggcactaaggaagattcctgccatcaaccagaccatcactgaagccaatgaaaagaccagagaagcccagcaggccctgggcagtgctgcggcggatgccacagaggccaagaacaaggcccatgaggcggagaggatcgcgagcgctgtccaaaagaatgccaccagcaccaaggcagaagctgaaagaacttttgcagaagttacagatctggataatgaggtgaacaatatgttgaagcaactgcaggaagcagaaaaagagctaaagagaaaacaagatgacgctgaccaggacatgatgatggcagggatggcttcacaggctgctcaagaagccgagatcaatgccagaaaagccaaaaactctgttactagcctcctcagcattattaatgacctcttggagcagctggggcagctggatacagtggacctgaataagctaaacgagattgaaggcaccctaaacaaagccaaagatgaaatgaaggtcagcgatcttgataggaaagtgtctgacctggagaatgaagccaagaagcaggaggctgccatcatggactataaccgagatatcgaggagatcatgaaggacattcgcaatctggaggacatcaggaagaccttaccatctggctgcttcaacaccccgtccattgaaaagccctagtgtctttagggctggaaggcagcatccctctgacaggggggcagttgtgaggccacagagtgccttgacacaaagattacatttttcagacccccactcctctgctgctgtccatgactgtccttttgaaccaggaaaagtcacagagtttaaagagaagcaaattaaacatcctgaatcgggaacaaagggttttatctaataaagtgtctcttccattcacgttgctaccttacccacactttcccttctgatttgcgtgaggacgtggcatcctacgttactgtacagtggcataagcacatcgtgtgagcccatgtatgctggggtagagcaagtagccctcccctgtctcatcgataccagcagaacctcctcagtctcagtactcttgtttctatgaaggaaaagtttggctactaacagtagcattgtgatggccagtatatccagtccatggataaagaaaatgcatctgcatctcctacccctcttccttctaagcaaaaggaaataaacatcctgtgccaaaggtattggtcatttagaatgtcggtagccatccatcagtgcttttagttattatgagtgtaggacactgagccatccgtgggtcaggatgcaattatttataaaagtctccaggtgaacatggctgaagatttttctagtatattaataattgactaggaagatgaactttttttcagatctttgggcagctgataatttaaatctggatgggcagcttgcactcaccaatagaccaaaagacatcttttgatattcttataaatggaacttacacagaagaaatagggatatgataaccactaaaattttgttttcaaaatcaaactaattcttacagcttttttattagttagtcttggaactagtgttaagtatctggcagagaacagttaatccctaaggtcttgacaaaacagaagaaaaacaagcctcctcgtcctagtcttttctagcaaagggataaaacttagatggcagcttgtactgtcagaatcccgtgtatccatttgttcttctgttggagagatgagacatttgacccttagctccagttttcttctgatgtttccatcttccagaatccctcaaaaaacattgtttgccaaatcctggtggcaaatacttgcactcagtatttcacacagctgccaacgctatcgagttcctgcactttgtgatttaaatccactctaaaccttccctctaagtgtagagggaagacccttacgtggagtttcctagtgggcttctcaacttttgatcctcagctctgtggttttaagaccacagtgtgacagttccctgccacacacccccttcctcctaccaacccacctttgagattcatatatagcctttaacactatgcaactttgtactttgcgtagcaggggcggggtggggggaaagaaactattatctgacacactggtgctattaattatttcaaatttatatttttgtgtgaatgttttgtgttttgtttatcatgattatagaataaggaatttatgtaaatatacttagtcctatttctagaatgacactctgttcactttgctcaatttttcctcttcactggcacaatgtatctgaatacctccttccctcccttctagaattctttggattgtactccaaagaattgtgccttgtgtttgcagcatctccattctctaaaattaatataattgctttcctccacacccagccactgtaaagaggtaacttgggtcctcttccattgcagtcctgatgatcctaacctgcagcacggtggttttacaatgttccagagcaggaacgccaggttgacaagctatggtaggattaggaaagtttgctgaagaggatctttgacgccacagtgggactagccaggaatgagggagaaatgccctttctggcaattgttggagctggataggtaagttttataagggagtacattttgactgagcacttagggcatcaggaacagtgctacttactgatgggtagactgggagaggtggtgtaacttagttcttgatgatcccacttcctgtttccatctgcttgggatataccagagtttaccacaagtgttttgacgatatactcctgagctttcactctgctgcttctcccaggcctcttctactatggcaggagatgtggcgtgctgttgcaaagttttcacgtcattgtttcctggctagttcatttcattaagtggctacatcctaacatatgcatttggtcaaggttgcagaagaggactgaagattgactgccaagctagtttgggtgaagttcactccagcaagtctcaggccacaatggggtggtttggtttggtttccttttaactttctttttgttatttgcttttctcctccacctgtgtggtatattttttaagcagaattttattttttaaaataaaaggttctttacaagatgataccttaattacactcccgcaacacagccattattttattgtctagctccagttatctgtattttatgtaatgtaattgacaggatggctgctgcagaatgctggttgacacagggattattatactgctatttttccctgaatttttttcctttgaattccaactgtggaccttttatatgtgccttcactttagctgtttgccttaatctctacagccttgctctccggggtggttaataaaatgcaacacttggcatttttatgttttaagaaaaacagtattttatttataataaaatctgaatatttgtaacccttta

SEQ ID NO: 355 - DNA, 3246 bp, Homo sapiens
cgagcttctcacggagcctctcttgagcctcttggcagtttccccctctgtgcccctcacgtttccaccagaaacgtgaaggcagaggccacagattctccctgagccacctcacttggaagcaccatgtccggatgagatcgcacttcctgcagtgggcattagccacgtccaggtagaaccaaacctgttgcttttgtatgttgggtcaacttggcctgacgtttcagaggtagacacgagatagggagtttgttgcgggggtggggagaagtggtagacatgctggctaactgattatgattaagagaaacttagaagctgaagccagagagcatctcaaaggttcctgatacaatggatggtgtcactccaaccctttcgacaatcagagggaggaccttggagtccagcactctgcatgtgactccccgcagcctggacagaaataaagaccagatcaccaacatcttttccgggtttgcgggactcctcgccatcctcctggtcgttgcggttttctgcatcttgtggaattggaataaacggaagaagcgacaagttccttacctccgagttaccgtcatgcccttgctgactttgccacaaaccagacaaagagccaaaaatatttatgacatcttgccttggcgacaggaagacctggggagacatgagtcgaggagtatgcgcattttcagtactgagagcctcctctccagaaattctgagagcccggagcatgtgccctcccaagcaggcaatgccttccaggagcatacagcccacatccatgccacagagtacgcggtgggtatctatgacaacgccatggtcccccagatgtgtgggaacctcactccctcggcacactgcatcaatgtcagagcttccagagactgcgcaagcatttcttcagaggattcgcatgattatgtcaatgtccccacagcagaagagattgctgagactctagcttctaccaaaagcccttccagaaatctctttgttcttcccagtacccagaagctggagtttactgaggaaagagatgagggctgtggagatgctggtgactgcaccagtttgtattctccaggagctgaggacagtgattcactcagcaatggagaaggttcttctcagatctcaaatgactatgtcaacatgacagggttggatctcagtgccatccaggaaaggcagctctgggtggcttttcagtgctgcagagactatgaaaatgttccagcagcagatcccagtggaagccagcagcaggctgagaaagatgtgccatcctcaaacataggtcatgtcgaggacaagacagatgatcccgggacccatgtccaatgtgtcaaaaggacattccttgcttcaggggattatgcagactttcagccattcacacagagtgaggacagtcagatgaaacatagagaagagatgtcaaatgaggactccagtgactatgaaaatgtgctaactgccaagttaggaggcagggactctgagcaggggcctggcactcagctccttcctgatgaatgaagacccaggtacccagccataaagccacattgagtagtctatcccataggattgactactgcagagtctagtgcagacccgtgatcaccttagtgcttcagtggattcactggttagattaaaaagaggctgagatgagcagtgaactaagaggccacacaaaagcagaggtttgggaattccagaagggaattcttctcaagcagagtgtggttatctcctgtaccagcctaagaatgtttgctgaaactgcttcctagaactgtgaagaaagcaggaaagtagtgcacagtagtctaagattattaccttcattaataccaacaggctgcaaagcaagagtatagattattgtataatccagtcagaggtcaaaaggaaggaagaagttggagtggagtggggtgggcaatttccattttaaagagtgtaggcaggccaggtgcagtggctcatgcctgtaatcccagcattttggtaggccgaggagggcagatcacttggtgccaggagttctagaccagcctggccaacatgacccatctttactaaaaatacaaaaattagccaggcgtggtggtgtgcccctgtaatcccagctactcaggaggctgaagcaggagaatcgcttgaacccgggaggtggaggttgcagcaagccgagattgtgccactgtactccagcctggtgacagagcgagactccctctcaaaaaaacaaaacaaacaaaaaagaagtgtgggcaaccaaatgtaggtaaggatgaagaagaacaggaactctcactggtggctgatgggattgcaaagcgtcagggcagctttgaaaaacttttcagcagtttcttataagcataacttatcatatggcccagccatttcactactagaaattgacccaagtgaactgaaaacttatgttcacacaaaaactcgcacatgactgtttatagcagcttcattcataattaccaaaaactagaaataacccagatatccttcaacaggtgattggataagctgttgatatccattccttgagtttatccatactcaacagtaaaaaatgaactcttggttcacacaataatatagacatatcttaaatccattttgctaagtgaaagaagctaggcctaaaagtctacatgttgggcgattctatttatatgacattctggaaaaggcaaaactatagggatgaagaacagatcagttgttgtcaggtttgagaaaaggagggaagtttgctacaaaggggctgcaaagggaataggctgatggagctgttctgtatggtactgtgtggtggatacatgacaatatccatttgcaaacacaagaactatacacatggccaggcgcggtggctcacacccgtaatcccagcactttgcggggccgaggcaggggaacacaaggtcaggagatcaagactgtcctggacaacatggtgaaaccctgtctctactgtctctaacatttgtaaacctgtctctaatttgtaatttgtaaaccctgtctctcatatttgtaaaaatacaaaaattagcttggcatggtggtgtgcgcctgtagtcccagctactaggaggctgaggcaggagaatcacttgaaccaggaaggcggactgcattccagcctgggcaacagagaaagactctgtctcaaaaaaaaaaaaaaaaaaaaaa

SEQ ID NO: 356 - DNA, 840 bp, Homo sapiens
actcgccacctcctcttccacccctgccaggcccagcagccaccacagcgcctgcttcctcggccctgaaatcatgcccctaggtctcctgtggctgggcctagccctgttgggggctctgcatgcccaggcccaggactccacctcagacctgatcccagccccacctctgagcaaggtccctctgcagcagaacttccaggacaaccaattccaggggaagtggtatgtggtaggcctggcagggaatgcaattctcagagaagacaaagacccgcaaaagatgtatgccaccatctatgagctgaaagaagacaagagctacaatgtcacctccgtcctgtttaggaaaaagaagtgtgactactggatcaggacttttgttccaggttgccagcccggcgagttcacgctgggcaacattaagagttaccctggattaacgagttacctcgtccgagtggtgagcaccaactacaaccagcatgctatggtgttcttcaagaaagtttctcaaaacagggagtacttcaagatcaccctctacgggagaaccaaggagctgacttcggaactaaaggagaacttcatccgcttctccaaatctctgggcctccctgaaaaccacatcgtcttccctgtcccaatcgaccagtgtatcgacggctgagtgcacaggtgccgccagctgccgcaccagcccgaacaccattgagggagctgggagaccctccccacagtgccacccatgcagctgctccccaggccaccccgctgatggagccccaccttgtctgctaaataaacatgtgccctcaggccaaaaaaaaaaaaaaaaaa

SEQ ID NO: 357 - DNA, 2472 bp, Homo sapiens
gaagagaccatatttgttcgcagaggaagccgttgctttctgggatctggctacgccagaaaagacatcggctccaacaggggtgttccacagggtagctgggagttggaagagccaagaacgcctccgagctctggatttgagcttctctgcccatgggtgaagcgcccatgctcagcttgtgagcttcttcccgggagagcagccatggcactgaggaatgtgccctttcgctcagaggtcctgggctgggaccccgacagccttgctgactatttcaagaagctcaactataaggactgtgagaaggcagtgaagaagtaccacatcgatggggctcgcttcttgaacctgacagaaaatgacatccagaagttccccaagctccgggtgccgattctcagtaagttaagtcaggaaatcaacaagaacgaagagaggaggagcatcttcacacgcaaaccccaagtcccgcggtttcctgaagagacagaaagccacgaagaggacaatgggggctggtcgtcctttgaagaagacgattatgaaagtcccaatgatgaccaggatggggaggatgatggagactatgagtcccccaatgaggaggaagaggcacccgtggaagatgacgcggattatgagccgccaccctccaatgacgaggaagctctgcagaactccatcctgcctgccaagcctttccccaactccaactccatgtacatcgaccggcccccctctgggaaaaccccccagcagcctcctgtgcccccccagagaccgatggccgccctcccgcccccaccagccggccggaatcactcgccactgcccccaccccagaccaaccacgaagaacccagcagaagcagaaaccacaaaacggcaaagctccctgctccttcaatagacagaagcacgaaacctcccctagatcgttcattagctccgtttgatagagaacccttcacactaggaaagaaaccaccattttctgacaagccctcgattccagcgggaaggtcactcggggagcatttacccaagattcaaaagcctcctttaccaccgaccacggaaagacatgaaaggagcagccccctgccagggaagaagccacctgtgccaaagcatggatggggaccagacagaagagagaatgatgaagatgatgtgcatcagagacctttgccccagccagcactacttcctatgagctccaacactttcccttcaagatctactaagccaagtcccatgaaccctctcccatcctctcacatgcctggagcattctcagaaagtaacagcagttttccacagagtgcctccctgccaccatacttctctcaaggccctagcaacagaccacctatcagagccgaaggcagaaacttccccttgccacttccaaacaaacctcggcccccatcccccgcggaggaagagaattcattaaatgaagagtggtacgtttcttatattacccgaccagaggcagaagctgctcttagaaagataaaccaggatggcacatttctggtcagagacagctctaaaaaaacaacaaccaatccatatgtcctcatggtgttgtacaaagataaagtttacaacatccagatccgttatcagaaggaaagtcaagtttacttgttgggaactggactccgagggaaagaggactttctgtctgtgtcagatattattgactacttcaggaaaatgccacttctgctcattgatgggaaaaaccgaggttccagataccagtgcacattaacgcatgctgcagggtacccatagcaagttatagccgagcaaatgaaccgtcctcctgcctctgttgccaacacgagatcaatcagccttggtcaatggacaaacacttaggactgaactgaacccctccccatgaacacaagggttttatcctttcctttaaaaacagtgtttgaaatgaagactgtcaactatcccataatttatttattcttcttcaatgtttgtaaagtgcatgagtcatgttcacacttgaagtctagtagtgcactgtaataattcattttttaaaagattatttaatgcccatttcaaaatacagtagtttacacagctacagaaacaatttggggcaagttttaaaacactgaaacagtaatagttattggtgtcacataaaactgatttgttttttacagccaaacctctgtcagtcagaggcattcattagttttatacatgtaatttgaaaatcactaaacctcgttttctcagcagcaataatttaagaggcttcaaaaatataatttcactcttatttagtattttttcctgggggcatttttacgtaatttttttatgaaaagacaaatgcatgttgagataacttctgggattaaaatagtcttttgctttaaaaaaaaaaaaaaaaaaaaaaaaaaaaaaaaaaaaaaaaaaaaaaaaaaa

SEQ ID NO: 358 - DNA, 2091 bp, Homo sapiens
ggtcaccctgccacccagtgctcacaccctctggccagtgcctggctatggcccgactgctcaggtctgcaacctgggagctgttcccctggaggggctactgctcccagaaggcaaagggagagctctgcagggacttcgtagaggctctgaaggccgtggtgggcggctcccacgtgtccactgccgcggtggtccgagagcagcacgggcgcgatgagtcggtgcacaggtgcgaacctcctgatgctgtggtgtggccccagaacgtggagcaggtcagccggctggcagccctgtgctatcgccaaggtgtgcccatcatcccattcggcaccggcaccgggcttgagggtggcgtctgtgctgtgcagggcggcgtctgcgttaacctgacgcatatggaccgaatcctggagctgaaccaggaggacttctctgtggtggtggagccaggtgtcacccgcaaagccctcaacgcccacctgcgggacagcggcctctggtttcccgtggacccaggcgcggacgcctctctctgtggcatggcggccaccggggcgtcggggaccaacgcggtccgctacggcaccatgcgggacaacgtgctcaacctggaggtggtgctgcccgacgggcggctgctgcacacggcgggccgaggccggcatttccgcttcggcttctggccagaaatccctcatcacacagcctggtactcaccttgtgtgtccctgggacgtaggaagagtgcagccggctacaacctcacggggctcttcgtgggctccgaggggacgctgggcctcatcacagccaccaccctgcgcctgcaccctgcccctgaggccacagtggccgccacgtgtgcgttccccagtgtccaggctgctgtggacagcactgtacacatcctccaggctgcagtgcccgtagcccgcattgagttcctggatgaagtcatgatggatgcctgcaacaggtacagcaagctgaattgcttagtggcgcccacactcttcctggagttccatggctcccagcaggcactggaggagcagctgcagcgcacagaggagatagtccagcagaacggagcctctgacttctcctgggccaaggaggccgaggagcgcagccggctttggacagcacggcacaatgcctggtacgcagccctggccacgcggccaggctgcaagggctactccacggatgtgtgtgtgcccatctcccggctgccggagatcgtggtgcagaccaaggaggatctgaatgcctcaggactcacaggaagcattgtcgggcatgtgggtgacggcaacttccactgcatcctgctggtcaaccctgatgacgccgaggaactgggcagggtcaaggcttttgcagaacagctgggcaggcgggcactggctctccacggaacgtgcacgggggagcatggcatcggaatgggcaagcggcagctgctgcaggaggaggtgggcgccgtgggcgtggagaccatgcggcagctcaaggccgtgctagacccccaaggcctcatgaatccaggcaaagtgctgtgaagggggtctgagcacttagcccacaagttccctgactacggagccggttctggaacttttcttcatgccacggcccctgcaaggaaatagatgctgaggcagtcttcctgccagcgagcccactgtatctgggcccaaggccagagggcccagagagaagcctgagcaccgtgttacctccctggccctctggctggccccaggagcctttggttcagtaaacgacccagggtggttcccagcaaagctgcttcctctctgctcctacgcatcctgtcctggcgggaagagagcgtctgggtccattcaagactctgatgacacccctccccgaggcctcccactgccggggtcccaggacccttcccccttcacctggtgacaggaacactcctttcctggtatggaacgtgagctcccgtgacatgatgataggtcttctccttggggcctcccccaataaatctgtaataaacctgaaacccacctacagctaaaaaaaaaaaaaaaaaaaaaaaaa

SEQ ID NO: 359 - DNA, 2022 bp, Homo sapiens
ggtcaccctgccacccagtgctcacaccctctggccagtgcctggctatggcccgactgctcaggtctgcaacctgggagctgttcccctggaggggctactgctcccagaaggcaaagggagagctctgcagggacttcgtagaggctctgaaggccgtggtgggcggctcccacgtgtccactgccgcggtggtccgagagcagcacgggcgcgatgagtcggtgcacaggtgcgaacctcctgatgctgtggtgtggccccagaacgtggagcaggtcagccggctggcagccctgtgctatcgccaaggtgtgcccatcatcccattcggcaccggcaccgggcttgagggtggcgtctgtgctgtgcagggcggcgtctgcgttaacctgacgcatatggaccgaatcctggagctgaaccaggaggacttctctgtggtggtggagccaggtgtcacccgcaaagccctcaacgcccacctgcgggacagcggcctctggtttcccgtggacccaggcgcggacgcctctctctgtggcatggcggccaccggggcgtcggggaccaacgcggtccgctacggcaccatgcgggacaacgtgctcaacctggaggtggtgctgcccgacgggcggctgctgcacacggcgggccgaggccggcatttccggaagagtgcagccggctacaacctcacggggctcttcgtgggctccgaggggacgctgggcctcatcacagccaccaccctgcgcctgcaccctgcccctgaggccacagtggccgccacgtgtgcgttccccagtgtccaggctgctgtggacagcactgtacacatcctccaggctgcagtgcccgtagcccgcattgagttcctggatgaagtcatgatggatgcctgcaacaggtacagcaagctgaattgcttagtggcgcccacactcttcctggagttccatggctcccagcaggcactggaggagcagctgcagcgcacagaggagatagtccagcagaacggagcctctgacttctcctgggccaaggaggccgaggagcgcagccggctttggacagcacggcacaatgcctggtacgcagccctggccacgcggccaggctgcaagggctactccacggatgtgtgtgtgcccatctcccggctgccggagatcgtggtgcagaccaaggaggatctgaatgcctcaggactcacaggaagcattgtcgggcatgtgggtgacggcaacttccactgcatcctgctggtcaaccctgatgacgccgaggaactgggcagggtcaaggcttttgcagaacagctgggcaggcgggcactggctctccacggaacgtgcacgggggagcatggcatcggaatgggcaagcggcagctgctgcaggaggaggtgggcgccgtgggcgtggagaccatgcggcagctcaaggccgtgctagacccccaaggcctcatgaatccaggcaaagtgctgtgaagggggtctgagcacttagcccacaagttccctgactacggagccggttctggaacttttcttcatgccacggcccctgcaaggaaatagatgctgaggcagtcttcctgccagcgagcccactgtatctgggcccaaggccagagggcccagagagaagcctgagcaccgtgttacctccctggccctctggctggccccaggagcctttggttcagtaaacgacccagggtggttcccagcaaagctgcttcctctctgctcctacgcatcctgtcctggcgggaagagagcgtctgggtccattcaagactctgatgacacccctccccgaggcctcccactgccggggtcccaggacccttcccccttcacctggtgacaggaacactcctttcctggtatggaacgtgagctcccgtgacatgatgataggtcttctccttggggcctcccccaataaatctgtaataaacctgaaacccacctacagctaaaaaaaaaaaaaaaaaaaaaaaaa

SEQ ID NO: 360 - DNA, 3907 bp, Homo sapiens
gaaccggtagtccgcggtggcgcggtccgcccctcacctggccagcggcgggcgctgaggggcccaatgggagccgcggcctggccgccccgccccgcgcctccggacgtctgtgccgggacaaggccgccgctggtgccgggtccttgaggagagcgcctcccgtccgaggccagccgcctctgtcagccgtccgcgcgggccgggtctgaagcgccgccgggacggcgaagagccgcggccgccgcggagaaggaggcagcgcaggaggccggagcggccgccgcgcccgagcacatggcgtccatcttactgaggagctgccgcggccgggcgcccgcccgcctcccgccgccgcctcggtacaccgtcccgcggggtagtccaggggatcctgctcatctcagctgtgccagcaccctggggttgaggaactgcctgaatgttccatttggctgctgcactcccatccaccctgtgtacacatcctccagaggcgatcacctcggctgttgggctctgaggcccgagtgccttcgcatagtgtcgagagcgccatggacctctacctctgtgggttttgtggctgtgggacctcagtgccttcctgtgcgtggctggcactcttcgcgccctgttcgcgatgactcggtagtagagaagtccctcaagtccttgaaggacaagaacaagaagctggaggaaggcggcccggtgtacagcccccccgcagaggtggtggtgaagaagtccctggggcagcgggtgctggacgagctgaagcactactaccatggcttccgcctgctatggatcgacaccaagatcgcggcacgcatgctctggcgcatcctcaacggccacagcctgacccgccgggagcgcaggcagtttctccggatctgcgctgacctcttccgcctggtgccgttccttgtgttcgtggtggtgccgttcatggagtttctgctgcctgttgctgtgaagctcttccccaacatgttgccatccacatttgagactcagtcactcaaggaggagaggctgaagaaggagcttcgggtcaagctggagctggccaagttcctccaggacaccatcgaggagatggccttgaagaacaaggcagccaagggcagcgccaccaaagacttctctgtgtttttccagaagatccgggaaacaggggagaggcccagcaatgaggaaatcatgcgtttttccaaattatttgaggatgagctgaccctggacaacctgacacggccgcagctggtggccctgtgcaagctgctggagctacagtccatcggcaccaacaacttcctgcgcttccagcttaccatgcggctgcgctccataaaggcagacgacaagctgattgctgaggaaggggtggacagcctgaatgtcaaggagctgcaggcagcgtgtcgggcacgaggcatgcgggccctgggcgtcacggaagaccgcctgaggggtcagctgaagcagtggctggacctgcacctgcatcaggagatccccacatcgctgctcatcctgtcccgggccatgtacctcccggacaccctctctccagccgaccagctcaagtccacactgcagaccctcccagagattgtggcaaaggaagcacaggtgaaagtggccgaggtggagggcgagcaggtggacaacaaggccaagctggaggccacgctgcaggaggaggcggccatccagcaggagcaccgtgagaaggagctgcagaagcgctcggaggtggcgaaggattttgagcccgaacgtgtggtagctgctccccaaaggccggggaccgagccacagccagaaatgcctgacacagtcctgcagtcagagaccttgaaggacactgccccggtgctggagggcttgaaggaggaagagatcacgaaggaggaaatcgacatcctcagcgatgcctgctctaagctgcaggagcagaagaagtcactcaccaaggagaaggaggagctggagctgctgaaggaggatgtgcaggactacagcgaggacttgcaggagatcaagaaggaactttcaaagactggtgaagaaaaatacgtggaagaatctaaagccagcaagagattgacaaaaagggtgcagcaaatgatcgggcagatcgatggcttgatctcgcagctggagatggaccagcaggctggcaagctggccccggccaacggcatgcccacgggggagaacgtcatcagtgtcgctgagctcatcaacgccatgaagcaagtcaagcacattcccgaaagcaagctcaccagcctggccgcagcactggatgaaaacaaggatggcaaggtcaacatcgacgacctcgtcaaggtgattgagctggtggacaaagaagatgttcacatctccaccagccaggtggctgagattgtagcaacactggaaaaagaggagaaggtggaggagaaggagaaggccaaagagaaggcagagaaggaggtcgcagaggtgaagagctagaaccactggcctgggcacctgtcctcctgctgtgccgtcaccctggcaagggccgtgagggcgattgctttgtggtgattctcagtggctcatctaatattttggctggaataaatcagagacttccataatcaagtaaattttaattttcatcattccatggagattcagtctgtctggaatcccggaacccctccacagaatcgtgtctggatccacactgtggtgtggctgccacggcctcctggctccagaggcagctgggccgggccaaggcaggaaggcgcccccatgtgtgtggcctcagtctcagcatctgactgtgctgccctgtccccagggaagagaatgaggaccacgtggactccgcccacacagagctggctgctgtgcccaccctcaggggcgtcaggagacacagcctggcctcctcagggctgaagatgcctccattcgcctgtggaccttgatttctagatttcagtgtcaatagacctgtcttcctgcacactttcagttggatgtgggtcattgtggagacagaggtgtctgccatctctgtggcctctggagagtgacgtctccctgctgggagtgctggttctcacgtgcggtttcccttgtgtatcggagctctttctcggctttctatttcccccagttctttaagcagtcaattggcacagagtttcccacgggggctgcagtggattcactgtgtcagggatgagcctggcttgggggttggtggggctctgaagcgcatttggggttctttgtagcttctaatgtgaggtttgagtccagtgcgcccacagcagcatgcccttctcaccccttgcagtgttgcaggctcaggcccctgggctccttcagcaagcaggctagtcaatgaggcatgaggatccggcacagggcatcccctggggcttcaagggcaatacccccgtgcttagggtttgccctgtgccctctgggtggggtggcctccccgcactcggcagcatggccaggctggccagggcgtgggcaggtggtgtcctgtggcacctccatcctcctgcccagccggctgtgtcacactcatctttttaaggtcaggttggttcctggcaaaaatgtacctccaggggcctccaagcataggatttggaagacaggaacggcacaggcgtccaggaaagcagctgcactcagacaatgccttctccattacttgaagcttctttctgttcagccattaaagaaacttgacaaaataggaacaggagatatttctcaattgtaaacctttgtgcagggacagttggcttccagaggtttcagctttcagttatttgagaagtttgttttagatccttaactaatatttatgaattctctcaccctg

SEQ ID NO: 361 - DNA, 2180 bp, Homo sapiens
aggaggcggtgcgtgcctcgcctgccaaagggagatccgctcctctgcgtgcgatccccggcgcccgcgcgcgcccacagcgctccgccagagctgccgccgcggactcgccgggagtgggggtctccgctggtgccagcccgcttctggagaccctccgcctcctgccaacccctgctcttccaggtcgggccccggggttctgcggctgttagggacagaggcaaagaagggcaggacggtccggtttcccgtggatgttcccgcccgagaaagacagcaagttgtgtgtgcgcccgggacgcgggagggaaggtagccgccgcccgccagccatggaccatcatctttagtgcagaggatggaaagttgatgcccagtaagactgaagatccattctgcattacggaactgtggattatctgtgggtccctggtgatttcacaccttcattcactcctgcagtccctgaacacttacttggggtcctcattgccctatctggtgaaagatggcatccagcctgacttgtactggagtaatctgggctttgctgtcttttctttgtgctgccacctcctgcgtggggttctttatgccttactggctctggggatcacagctgggcaagcctgtgtccttcggtaccttccggaggtgctcatatcctgtgcatgatgagagtcggcagatgatggtgatggtggaggaatgtgggcgctatgcctccttccagggcatccccagcgcagaatggaggatctgcaccatagtgaccggcctgggttgtggcctcctcctcctggtggcgctcactgccctcatgggttgctgtgtttccgacctcatctccaggacagtgggaagagtggctggaggaattcagtttcttgggggcttgttgattggtgctggctgtgccctctaccccttgggctgggacagtgaggaagtccggcagacttgtggctacacttctggccagtttgacctggggaagtgtgaaatcggctgggcctactactgcacgggagcaggtgccactgccgccatgctgctgtgcacgtggctggcttgcttttcgggcaagaaacagaagcactacccatactgagatggagctaccaagagcagacagaggagaagatgggccaaaggggcttggagaggtcaaaacatccacctaccttcaaaaggtgggatagtagttctaatccaatacaatgctaataaaatgaaacccgataaaatcaggaacatgatataggaaggaaggattgtaggagatttgtgggggaaaaaaaaggagagtatagaatgatggagaaaaatggaccaaaggctaaaaatattgcagggcatcgggtgtttctattccacagagtattgttaatgtacaacacacacacacacacacacacacacacacacacacacacacacacaacaaatctacatatacaaacaagggtttgggttttagttttttttttttaaggtgaggactcagaaaatcaaagggctagtagaaacagtgttatgttgggaagcagggtacccccaaagatgttccctgtaggtcacggcactcccaaaagcacacaagcacatacagacatatgcatccccacacacgcctatgcacaaacgtggattatcgcacagactgggaggtttagtggtgcatttctcctctgttttctttttaatatacatttaaaatacagtattatcactttataaaacatacattaagcctaataaatggaccaataagccaaactatcagtattttgtatatcctgcataaactctaatttagttcctcaacatattttcagtgtttatgcagacctttagagttaagcctttgtatttccatgttattccacaatatgcaatatttctctgagtagcttctgctatgatattcttatgaagaaaaggggcaactttctgtccactataggagagaattcagccgaagatatgagagtaatgagagacattttccagtcattggatcgtgttttcttttgtccattattgtactgtgctgtaccacatttatttctatattcattttgtaaaaaatttaaaagtgctattttgtttgtatttgaaaatctctgtgaataaattctctctttgatcaataaaaaaaaaaaaaaaaaaaaaaa

SEQ ID NO: 362 - DNA, 1559 bp, Homo sapiens
tagttcaagacaacagagacaaagctaagatgaggaagttctgtacagtttaggaaatagaggctttcaaagataattcgcagtgatgtgaaactggcctcccaagccctgataacaacatggccaacgccctggccagcgccacttgcgagcgctgcaagggcggctttgcgcccgctgagaagatcgtgaacagtaatggggagctgtaccatgagcagtgtttcgtgtgcgctcagtgcttccagcagttcccagaaggactcttctatgagtttgaaggaagaaagtactgtgaacatgactttcagatgctctttgccccttgctgtcatcagtgtggtgaattcatcattggccgagttatcaaagccatgaataacagctggcatccggagtgcttccgctgtgacctctgccaggaagttctggcagatatcgggtttgtcaagaatgctgggagacacctgtgtcgcccctgtcataatcgtgagaaagccagaggccttgggaaatacatctgccagaaatgccatgctatcatcgatgagcagcctctgatattcaagaacgacccctaccatccagaccatttcaactgcgccaactgcgggaaggagctgactgccgatgcacgggagctgaaaggggagctatactgcctcccatgccatgataaaatgggggtccccatctgtggtgcttgccgacggcccatcgaagggcgcgtggtgaacgctatgggcaagcagtggcatgtggagcattttgtttgtgccaagtgtgagaaaccctttcttggacatcgccattatgagaggaaaggcctggcatattgtgaaactcactataaccagctatttggtgatgtttgcttccactgcaatcgtgttatagaaggtgatgtggtctctgctcttaataaggcctggtgcgtgaactgctttgcctgttctacctgcaacactaaattaacactcaagaataagtttgtggagtttgacatgaagccagtctgtaagaagtgctatgagaaatttccattggagctgaagaaaagacttaagaaactagctgagaccttaggaaggaaataagttcctttattttttcttttctatgcaagataagagattaccaacattacttgtcttgatctacccatatttaaagctatatctcaaagcagttgagagaagaggacctatatgaatggttttatgtcatttttttaattaaaaaagaaaaattcatataatcgtgtttaaaacacaaatgaagtcagtatttgcctttgttaacccttatccatttgttgacatgtagactgtttacaaaaaaaaaacacatggttaaatgttaaattttaattaaggcccccaaaaattaaatataactttttaaaatgaaaggagtcaccttttacatgactcaggtgaaaaaacagtataaacattaatttactttgtgttcaaaagaaaattccaactgctgttggggaaggacacagaaaagaaaaataaccacccaaaaaaaaaaaaaaaaaaaaaaaaaaaaaa

SEQ ID NO: 363 - DNA, 1603 bp, Homo sapiens
ggtctctttggcttcagaaattaccaagaaagcctggaccccgggtgaaacggagaaatggacacaagtcccctgtgtttctccattctgttggttttatgcatctttatccaatcaagtgcccttggacaaagcctgaaaccagagccatttggaagaagagctcaagctgttgaaacaaacaaaacgctgcatgagatgaagaccagattcctgctctttggagaaaccaatcagggctgtcagattcgaatcaatcatccggacacgttacaggagtgcggcttcaactcctccctgcctctggtgatgataatccacgggtggtcggtggacggcgtgctagaaaactggatctggcagatggtggccgcgctgaagtctcagccggcccagccagtgaacgtggggctggtggactggatcaccctggcccacgaccactacaccatcgccgtccgcaacacccgccttgtgggcaaggaggtcgcggctcttctccggtggctggaggaatctgttcaactctctcgaagccatgttcacctaattgggtacagcctgggtgcacacgtgtcaggatttgccggcagttccatcggtggaacgcacaagattgggagaatcacagggctggatgccgcgggacctttgtttgagggaagtgcccccagcaatcgtctttctccagatgatgccaattttgtggatgccattcatacctttacgcgggagcacatgggcctgagcgtgggcatcaaacagcccataggacactatgacttctatcccaacgggggctccttccagcctggctgccacttcctagagctctacagacatattgcccagcacggcttcaatgccatcacccagaccataaaatgctcccacgagcgatcggtgcaccttttcatcgactccttgctgcacgccggcacgcagagcatggcctacccgtgtggtgacatgaacagcttcagccagggcctgtgcctgagctgcaagaagggccgctgcaacacgctgggctaccacgtccgccaggagccgcggagcaagagcaagaggctcttcctcgtaacgcgagcccagtcccccttcaaagtttatcattaccagttaaagatccagttcatcaaccaaactgagacgccaatacaaacaacttttaccatgtcactactcggaacaaaagagaaaatgcagaaaattcccatcactctgggcaaaggaattgctagtaataaaacgtattcctttcttatcacgctggatgtggatatcggcgagctgatcatgatcaagttcaagtgggaaaacagtgcagtgtgggccaatgtctgggacacggtccagaccatcatcccatggagcacagggccgcgccactcaggcctcgttctgaagacgatcagagtcaaagcaggagaaacccagcaaagaatgacattttgttcagaaaacacagatgacctactacttcgcccaacccaggaaaaaatcttcgtgaaatgtgaaataaagtctaaaacatcaaagcgaaagatcagatgagatttaatgaagacccagtgtaaagaataaatgaatcttactcctt

SEQ ID NO: 364 - DNA, 2361 bp, Homo sapiens
cctgttgcttattcattcagagtgggaaagcgccagccgagcggccagccagtgcggggctggccatgtaaggcccacaggcggtcctgcccgcccggtgccctgcggagagcctcgtgcagccctgggcaccgcccctgccctgccctgaccccttggccttgaaatgctgtcatcggaggagccgtcccgctcgggacaaggccagcatggacaaagctagagctggggcaagcaaggagccttcctgtcctcgaggccgtgggaagagaagcacgcccagggggccactcctgagagcctctctgtccaccaggcctctgcagaggggtcaccatggctctggcccgaggcagccggcagctgggggccctggtgtggggcgcctgcctgtgcgtgctggtgcacgggcagcaggcgcagcccgggcagggctcggaccccgcccgctggcggcagctgatccagtgggagaacaacgggcaggtgtacagcttgctcaactcgggctcagagtacgtgccggccggacctcagcgctccgagagtagctcccgggtgctgctggccggcgcgccccaggcccagcagcggcgcagccacgggagcccccggcgtcggcaggcgccgtccctgcccctgccggggcgcgtgggctcggacaccgtgcgcggccaggcgcggcacccattcggctttggccaggtgcccgacaactggcgcgaggtggccgtcggggacagcacgggcatggcccgggcccgcacctccgtctcccagcaacggcacgggggctccgcctcctcggtctcggcttcggccttcgccagcacctaccgccagcagccctcctacccgcagcagttcccctacccgcaggcgcccttcgtcagccagtacgagaactacgaccccgcgtcgcggacctacgaccagggtttcgtgtactaccggcccgcgggcggcggcgtgggcgcgggggcggcggccgtggcctcggcgggggtcatctacccctaccagccccgggcgcgctacgaggagtacggcggcggcgaagagctgcccgagtacccgcctcagggcttctacccggcccccgagaggccctacgtgccgccgccgccgccgccccccgacggcctggaccgccgctactcgcacagtctgtacagcgagggcacccccggcttcgagcaggcctaccctgaccccggtcccgaggcggcgcaggcccatggcggagacccacgcctgggctggtacccgccctacgccaacccgccgcccgaggcgtacgggccgccgcgcgcgctggagccgccctacctgccggtgcgcagctccgacacgcccccgccgggtggggagcggaacggcgcgcagcagggccgcctcagcgtgggcagcgtgtaccggcccaaccagaacggccgcggtctccctgacttggtcccagaccccaactatgtgcaagcatccacttatgtgcagagagcccacctgtactccctgcgctgtgctgcggaggagaagtgtctggccagcacagcctatgcccctgaggccaccgactacgatgtgcgggtgctactgcgcttcccccagcgcgtgaagaaccagggcacagcagacttcctccccaaccggccacggcacacctgggagtggcacagctgccaccagcattaccacagcatggacgagttcagccactacgacctactggatgcagccacaggcaagaaggtggccgagggccacaaggccagtttctgcctggaggacagcacctgtgacttcggcaacctcaagcgctatgcatgcacctctcatacccagggcctgagcccaggctgctatgacacctacaatgcggacatcgactgccagtggatcgacataaccgacgtgcagcctgggaactacatcctcaaggtgcacgtgaacccaaagtatattgttttggagtctgacttcaccaacaacgtggtgagatgcaacattcactacacaggtcgctacgtttctgcaacaaactgcaaaattgtccaatcctgatctccgggagggacagatggccaatctctccccttccaaagcaggccctgctccccgggcagcctcccgccgaggggcccagcccccaacccacaggcacggaggggcatccctccctgccggcctcagggagcgaacgtggatgaaaaccacagggattccggacgccagaccccattttatacttcacttttctctacagtgttgttttgttgttgttggtttttattttttatactttggccataccacagagctagattgcccaggtctgggctgaataaaacaaggtttttctac

SEQ ID NO: 365 - DNA, 5723 bp, Homo sapiens
cggcgaacagacgttctttctcctccatgcagttacacaaaaggagggctacggaaactaaaagtttcggggcctctggctcggtgtgtggagaaaagagaaaacctggagacgggatatgaagatcaatgatgcagactgatggttttgatgaagctgggcatttataactagattcattaaggaatacaaagaaaatacttaaagggatcaataatggtgtcttctggttgcagaatgcgaagtctgtggtttatcattgtaatcagcttcttaccaaatacagaaggtttcagcagagcagctttaccatttgggctggtgaggcgagaattatcctgtgaaggttattctatagatctgcgatgcccgggcagtgatgtcatcatgattgagagcgctaactatggtcggacggatgacaagatttgtgatgctgacccatttcagatggagaatacagactgctacctccccgatgccttcaaaattatgactcaaaggtgcaacaatcgaacacagtgtatagtagttactgggtcagatgtgtttcctgatccatgtcctggaacatacaaataccttgaagtccaatatgaatgtgtcccttacatttttgtgtgtcctgggaccttgaaagcaattgtggactcaccatgtatatatgaagctgaacaaaaggcgggtgcttggtgcaaggaccctcttcaggctgcagataaaatttatttcatgccctggactccctatcgtaccgatactttaatagaatatgcttctttagaagatttccaaaatagtcgccaaacaacaacatataaacttccaaatcgagtagatggtactggatttgtggtgtatgatggtgctgtcttctttaacaaagaaagaacgaggaatattgtgaaatttgacttgaggactagaattaagagtggcgaggccataattaactatgccaactaccatgatacctcaccatacagatggggaggaaagactgatatcgacctagcagttgatgaaaatggtttatgggtcatttacgccactgaacagaacaatggaatgatagttattagccagctgaatccatacactcttcgatttgaagcaacgtgggagactgtatacgacaaacgtgccgcatcaaatgcttttatgatatgcggagtcctctatgtggttaggtcagtttatcaagacaatgaaagtgaaacaggcaagaactcaattgattacatttataatacccgattaaaccgaggagaatatgtagatgttcccttccccaaccagtatcagtatattgctgcagtggattacaatccaagagataaccaactttacgtgtggaacaataacttcattttacgatattctctggagtttggtccacctgatcctgcccaagtgcctaccacagctgtgacaataacttcttcagctgagctgttcaaaaccataatatcaaccacaagcactacttcacagaaaggccccatgagcacaactgtagctggatcacaggaaggaagcaaagggacaaaaccacctccagcagtttctacaaccaaaattccacctataacaaatatttttcccctgccagagagattctgtgaagcattagactccaaggggataaagtggcctcagacacaaaggggaatgatggttgaacgaccatgccctaagggaacaagaggaactgcctcatatctctgcatgatttccactggaacatggaaccctaagggccccgatcttagcaactgtacctcacactgggtgaatcagctggctcagaagatcagaagcggagaaaatgctgctagtcttgccaatgaactggctaaacataccaaagggccagtgtttgctggggatgtaagttcttcagtgagattgatggagcagttggtggacatccttgatgcacagctgcaggaactgaaacctagtgaaaaagattcagctggacggagttataacaaggcaattgttgacacagtggacaaccttctgagacctgaagctttggaatcatggaaacatatgaattcttctgaacaagcacatactgcaacaatgttactcgatacattggaagaaggagcttttgtcctagctgacaatcttttagaaccaacaagggtctcaatgcccacagaaaatattgtcctggaagttgccgtactcagtacagaaggacagatccaagactttaaatttcctctgggcatcaaaggagcaggcagctcaatccaactgtccgcaaataccgtcaaacagaacagcaggaatgggcttgcaaagttggtgttcatcatttaccggagcctgggacagttccttagtacagaaaatgcaaccattaaactgggtgctgattttattggtcgtaatagcaccattgcagtgaactctcacgtcatttcagtttcaatcaataaagagtccagccgagtatacctgactgatcctgtgctttttaccctgccacacattgatcctgacaattatttcaatgcaaactgctccttctggaactactcagagagaactatgatgggatattggtctacccagggctgcaagctggttgacactaataaaactcgaacaacgtgtgcatgcagccacctaaccaattttgcaattctcatggcccacagggaaattgcatataaagatggcgttcatgaattacttcttacagtcatcacctgggtgggaattgtcatttcccttgtttgcctggctatctgcatcttcaccttctgctttttccgtggcctacagagtgaccgaaatactattcacaagaacctttgtatcaaccttttcattgctgaatttattttcctaataggcattgataagacaaaatatgcgattgcatgcccaatatttgcaggacttctacactttttctttttggcagcttttgcttggatgtgcctagaaggtgtgcagctctacctaatgttagttgaagtttttgaaagtgaatattcaaggaaaaaatattactatgttgctggttacttgtttcctgccacagtggttggagtttcagctgctattgactataagagctatggaacagaaaaagcttgctggcttcatgttgataactactttatatggagcttcattggacctgttaccttcattattctgctaaatattatcttcttggtgatcacattgtgcaaaatggtgaagcattcaaacactttgaaaccagattctagcaggttggaaaacattaagtcttgggtgcttggcgctttcgctcttctgtgtcttcttggcctcacctggtcctttgggttgctttttattaatgaggagactattgtgatggcatatctcttcactatatttaatgctttccagggagtgttcattttcatctttcactgtgctctccaaaagaaagtacgaaaagaatatggcaagtgcttcagacactcatactgctgtggaggcctcccaactgagagtccccacagttcagtgaaggcatcaaccaccagaaccagtgctcgctattcctctggcacacagagtcgtataagaagaatgtggaatgatactgtgagaaaacaatcagaatcttcttttatctcaggtgacatcaatagcacttcaacacttaatcaaggacattcactgaacaatgccagggatacaagtgccatggatactctaccgctaaatggtaattttaacaacagctactcgctgcacaagggtgactataatgacagcgtgcaagttgtggactgtggactaagtctgaatgatactgcttttgagaaaatgatcatttcagaattagtgcacaacaacttacggggcagcagcaagactcacaacctcgagctcacgctaccagtcaaacctgtgattggaggtagcagcagtgaagatgatgctattgtggcagatgcttcatctttaatgcacagcgacaacccagggctggagctccatcacaaagaactcgaggcaccacttattcctcagcggactcactcccttctgtaccaaccccagaagaaagtgaagtccgagggaactgacagctatgtctcccaactgacagcagaggctgaagatcacctacagtcccccaacagagactctctttatacaagcatgcccaatcttagagactctccctatccggagagcagccctgacatggaagaagacctctctccctccaggaggagtgagaatgaggacatttactataaaagcatgccaaatcttggagctggccatcagcttcagatgtgctaccagatcagcaggggcaatagtgatggttatataatccccattaacaaagaagggtgtattccagaaggagatgttagagaaggacaaatgcagctggttacaagtctttaatcatacagctaaggaattccaagggccacatgcgagtattaataaataaagacaccattggcctgacgcagctccctcaaactctgcttgaagagatgactcttgacctgtggttctctggtgtaaaaaagatgactgaaccttgcagttctgtgaatttttataaaacatacaaaaactttgtatatacacagagtatactaaagtgaattatttgttacaaagaaaagagatgccagccaggtattttaagattctgctgctgtttagagaaattgtgaaacaagcaaaacaaaactttccagccattttactgcagcagtctgtgaactaaatttgtaaatatggctgcaccatttttgtaggcctgcattgtattatatacaagacgtaggctttaaaatcctgtgggacaaatttactgtaccttactattcctgacaagacttggaaaagcaggagagatattctgcatcagtttgcagttcactgcaaatcttttacattaaggcaaagattgaaaacatgcttaaccactagcaatcaagccacaggccttatttcatatgtttcctcaactgtacaatgaactattctcatgaaaaatggctaaagaaattatattttgttctattgctagggtaaaataaatacatttgtgtccaactgaaatataattgtcattaaaataattttaaagagtgaagaaaatattgtgaaaagctcttggttgcacatgttatgaaatgttttttcttacactttgtcatggtaagttctactcattttcacttcttttccactgtatacagtgttctgctttgacaaagttagtctttattacttacatttaaatttcttattgccaaaagaacgtgttttatggggagaaacaaactctttgaagccagttatgtcatgccttgcacaaaagtgatgaaatctagaaaagattgtgtgtcacccctgtttattcttgaacagagggcaaagagggcactgggcacttctcacaaactttctagtgaacaaaaggtgcctattcttttttaaaaaaataaaataaaacataaatattactcttccatattccttctgcctatatttagtaattaatttattttatgataaagttctaatgaaatgtaaattgtttcagcaaaattctgcttttttttcatccctttgtgtaaacctgttaataatgagcccatcactaatatccagtgtaaagtttaacacggtttgacagtaaataaatgtgaattttttcaagtaaaaaaaaaaaaaaaaaa

SEQ ID NO: 366 - DNA, 9234 bp, Homo sapiens
cgctggctgcgggcggtgagctgagctcgcccccggggagctgtggccggcgcccctgccggttccctgagcagcggacgttcatgctgggagggcggcgggttggaagcaggtgccaccatggctagtggcagctgtcaggggtgcgaagaggacgaggaaactctgaagaagttgatagtcaggctgaacaatgtccaggaaggaaaacagatagaaacgctggtccaaatcctggaggatctgctggtgttcacgtactccgagcacgcctccaagttatttcaaggcaaaaatatccatgtgcctctgttgatcgtcttggactcctatatgagagtcgcgagtgtgcagcaggtgggttggtcacttctgtgcaaattaatagaagtctgtccaggtacaatgcaaagcttaatgggaccccaggatgttggaaatgattgggaagtccttggtgttcaccaattgattcttaaaatgctaacagttcataatgccagtgtaaacttgtcagtgattggactgaagaccttagatctcctcctaacttcaggtaaaatcaccttgctgatattggatgaagaaagtgatattttcatgttaatttttgatgccatgcactcatttccagccaatgatgaagtccagaaacttggatgcaaagctttacatgtgctgtttgagagagtctcagaggagcaactgactgaatttgttgagaacaaagattatatgatattgttaagtgcgtcaacaaattttaaagatgaagaggaaattgtgcttcatgtgctgcattgtttacattccctagcgattccttgcaataatgtggaagtcctcatgagtggcaatgtcaggtgttataatattgtggtggaagctatgaaagcattccctatgagtgaaagaattcaagaagtgagttgctgtttgctccataggcttacattaggtaattttttcaatatcctggtattaaacgaagtccatgagtttgtggtgaaagctgtgcagcagtacccagagaatgcagcattgcagatctcagcgctcagctgtttggccctcctcactgagactattttcttaaatcaagatttagaggaaaagaatgagaatcaagagaatgatgatgagggggaagaagataaattgttttggctggaagcctgttacaaagcattaacgtggcatagaaagaacaagcacgtgcaggaggccgcatgctgggcactaaataatctccttatgtaccaaaacagtttacatgagaagattggagatgaagatggccatttcccagctcatagggaagtgatgctctccatgctgatgcattcttcatcaaaggaagttttccaggcatctgcgaatgcattgtcaactctcttagaacaaaatgttaatttcagaaaaatactgttatcaaaaggaatacacctgaatgttttggagttaatgcagaagcatatacattctcctgaagtggctgaaagtggctgtaaaatgctaaatcatctttttgaaggaagcaacacttccctggatataatggcagcagtggtccccaaaatactaacagttatgaaacgtcatgagacatcattaccagtgcagctggaggcgcttcgagctattttacattttatagtgcctggcatgccagaagaatccagggaggatacagaatttcatcataagctaaatatggttaaaaaacagtgtttcaagaatgatattcacaaactggtcctagcagctttgaacaggttcattggaaatcctgggattcagaaatgtggattaaaagtaatttcttctattgtacattttcctgatgcattagagatgttatccctggaaggtgctatggattcagtgcttcacacactgcagatgtatccagatgaccaagaaattcagtgtctgggtttaagtcttataggatacttgattacaaagaagaatgtgttcataggaactggacatctgctggcaaaaattctggtttccagcttataccgatttaaggatgttgctgaaatacagactaaaggatttcagacaatcttagcaatcctcaaattgtcagcatctttttctaagctgctggtgcatcattcatttgacttagtaatattccatcaaatgtcttccaatatcatggaacaaaaggatcaacagtttctaaacctctgttgcaagtgttttgcaaaagtagctatggatgattacttaaaaaatgtgatgctagagagagcgtgtgatcagaataacagcatcatggttgaatgcttgcttctattgggagcagatgccaatcaagcaaaggagggatcttctttaatttgtcaggtatgtgagaaagagagcagtcccaaattggtggaactcttactgaatagtggatctcgtgaacaagatgtacgaaaagcgttgacgataagcattgggaaaggtgacagccagatcatcagcttgctcttaaggaggctggccctggatgtggccaacaatagcatttgccttggaggattttgtataggaaaagttgaaccttcttggcttggtcctttatttccagataagacttctaatttaaggaaacaaacaaatatagcatctacactagcaagaatggtgatcagatatcagatgaaaagtgctgtggaagaaggaacagcctcaggcagcgatggaaatttttctgaagatgtgctgtctaaatttgatgaatggacctttattcctgactcttctatggacagtgtgtttgctcaaagtgatgacctggatagtgaaggaagtgaaggctcatttcttgtgaaaaagaaatctaattcaattagtgtaggagaattttaccgagatgccgtattacagcgttgctcaccaaatttgcaaagacattccaattccttggggcccatttttgatcatgaagatttactgaagcgaaaaagaaaaatattatcttcagatgattcactcaggtcatcaaaacttcaatcccatatgaggcattcagacagcatttcttctctggcttctgagagagaatatattacatcactagacctttcagcaaatgaactaagagatattgatgccctaagccagaaatgctgtataagtgttcatttggagcatcttgaaaagctggagcttcaccagaatgcactcacgagctttccacaacagctatgtgaaactctgaagagtttgacacatttggacttgcacagtaataaatttacatcatttccttcttatttgttgaaaatgagttgtattgctaatcttgatgtctctcgaaatgacattggaccctcagtggttttagatcctacagtgaaatgtccaactctgaaacagtttaacctgtcatataaccagctgtcttttgtacctgagaacctcactgatgtggtagagaaactggagcagctcattttagaaggaaataaaatatcagggatatgctcccccttgagactgaaggaactgaagattttaaaccttagtaagaaccacatttcatccctatcagagaactttcttgaggcttgtcctaaagtggagagtttcagtgccagaatgaattttcttgctgctatgcctttcttgcctccttctatgacaatcctaaaattatctcagaacaaattttcctgtattccagaagcaattttaaatcttccacacttgcggtctttagatatgagcagcaatgatattcagtacctaccaggtcccgcacactggaaatctttgaacttaagggaactcttatttagccataatcagatcagcatcttggacttgagtgaaaaagcatatttatggtctagagtagagaaactgcatctttctcacaataaactgaaagagattcctcctgagattggctgtcttgaaaatctgacatctctggatgtcagttacaacttggaactaagatcctttcccaatgaaatggggaaattaagcaaaatatgggatcttcctttggatgaactgcatcttaactttgattttaaacatataggatgtaaagccaaagacatcataaggtttcttcaacagcgattaaaaaaggctgtgccttataaccgaatgaaacttatgattgtgggaaatactgggagtggtaaaaccaccttattgcagcaattaatgaaaaccaagaaatcagatcttggaatgcaaagtgccacagttggcatagatgtgaaagactggcctatccaaataagagacaaaagaaagagagatctcgtcctaaatgtgtgggattttgcaggtcgtgaggaattctatagtactcatccccattttatgacgcagcgagcattgtaccttgctgtctatgacctcagcaagggacaggctgaagttgatgccatgaagccttggctcttcaatataaaggctcgcgcttcttcttcccctgtgattctcgttggcacacatttggatgtttctgatgagaagcaacgcaaagcctgcatgagtaaaatcaccaaggaactcctgaataagcgagggttccctgccatacgagattaccactttgtgaatgccaccgaggaatctgatgctttggcaaaacttcggaaaaccatcataaacgagagccttaatttcaagatccgagatcagcttgttgttggacagctgattccagactgctatgtagaacttgaaaaaatcattttatcggagcgtaaaaatgtgccaattgaatttcccgtaattgaccggaaacgattattacaactagtgagagaaaatcagctgcagttagatgaaaatgagcttcctcacgcagttcactttctaaatgaatcaggagtccttcttcattttcaagacccagcactgcagttaagtgacttgtactttgtggaacccaagtggctttgtaaaatcatggcacagattttgacagtgaaagtggaaggttgtccaaaacaccctaagggcattatttcgcgtagagatgtggaaaaatttctttcaaaaaaaaggaaatttccaaagaactacatgtcacagtattttaagctcctagaaaaattccagattgctttgccaataggagaagaatatttgctggttccaagcagtttgtctgaccacaggcctgtgatagagcttccccattgtgagaactctgaaattatcatccgactatatgaaatgccttattttccaatgggattttggtcaagattaatcaatcgattacttgagatttcaccttacatgctttcagggagagaacgagcacttcgcccaaacagaatgtattggcgacaaggcatttacttaaattggtctcctgaagcttattgtctggtaggatctgaagtcttagacaatcatccagagagtttcttaaaaattacagttccttcttgtagaaaaggctgtattcttttgggccaagttgtggaccacattgattctctcatggaagaatggtttcctgggttgctggagattgatatttgtggtgaaggagaaactctgttgaagaaatgggcattatatagttttaatgatggtgaagaacatcaaaaaatcttacttgatgacttgatgaagaaagcagaggaaggagatctcttagtaaatccagatcaaccaaggctcaccattccaatatctcagattgcccctgacttgattttggctgacctgcctagaaatattatgttgaataatgatgagttggaatttgaacaagctccagagtttctcctaggtgatggcagttttggatcagtttaccgagcagcctatgaaggagaagaagtggctgtgaagatttttaataaacatacatcactcaggctgttaagacaagagcttgtggtgctttgccacctccaccaccccagtttgatatctttgctggcagctgggattcgtccccggatgttggtgatggagttagcctccaagggttccttggatcgcctgcttcagcaggacaaagccagcctcactagaaccctacagcacaggattgcactccacgtagctgatggtttgagatacctccactcagccatgattatataccgagacctgaaaccccacaatgtgctgcttttcacactgtatcccaatgctgccatcattgcaaagattgctgactacggcattgctcagtactgctgtagaatggggataaaaacatcagagggcacaccagggtttcgtgcacctgaagttgccagaggaaatgtcatttataaccaacaggctgatgtttattcatttggtttactactctatgacattttgacaactggaggtagaatagtagagggtttgaagtttccaaatgagtttgatgaattagaaatacaaggaaaattacctgatccagttaaagaatatggttgtgccccatggcctatggttgagaaattaattaaacagtgtttgaaagaaaatcctcaagaaaggcctacttctgcccaggtctttgacattttgaattcagctgaattagtctgtctgacgagacgcattttattacctaaaaacgtaattgttgaatgcatggttgctacacatcacaacagcaggaatgcaagcatttggctgggctgtgggcacaccgacagaggacagctctcatttcttgacttaaatactgaaggatacacttctgaggaagttgctgatagtagaatattgtgcttagccttggtgcatcttcctgttgaaaaggaaagctggattgtgtctgggacacagtctggtactctcctggtcatcaataccgaagatgggaaaaagagacataccctagaaaagatgactgattctgtcacttgtttgtattgcaattccttttccaagcaaagcaaacaaaaaaattttcttttggttggaaccgctgatggcaagttagcaatttttgaagataagactgttaagcttaaaggagctgctcctttgaagatactaaatataggaaatgtcagtactccattgatgtgtttgagtgaatccacaaattcaacggaaagaaatgtaatgtggggaggatgtggcacaaagattttctccttttctaatgatttcaccattcagaaactcattgagacaagaacaagccaactgttttcttatgcagctttcagtgattccaacatcataacagtggtggtagacactgctctctatattgctaagcaaaatagccctgttgtggaagtgtgggataagaaaactgaaaaactctgtggactaatagactgcgtgcactttttaagggaggtaatggtaaaagaaaacaaggaatcaaaacacaaaatgtcttattctgggagagtgaaaaccctctgccttcagaagaacactgctctttggataggaactggaggaggccatattttactcctggatctttcaactcgtcgacttatacgtgtaatttacaacttttgtaattcggtcagagtcatgatgacagcacagctaggaagccttaaaaatgtcatgctggtattgggctacaaccggaaaaatactgaaggtacacaaaagcagaaagagatacaatcttgcttgaccgtttgggacatcaatcttccacatgaagtgcaaaatttagaaaaacacattgaagtgagaaaagaattagctgaaaaaatgagacgaacatctgttgagtaagagagaaataggaattgtctttggataggaaaattattctctcctcttgtaaatatttattttaaaaatgttcacatggaaagggtactcacattttttgaaatagctcgtgtgtatgaaggaatgttattatttttaatttaaatatatgtaaaaatacttaccagtaaatgtgtattttaaagaactatttaaaacacaatgttatatttcttataaataccagttactttcgttcattaattaatgaaaataaatctgtgaagtacctaatttaagtactcatactaaaatttataaggccgataattttttgttttcttgtctgtaatggaggtaaactttattttaaattctgtgcttaagacaggactattgcttgtcgatttttctagaaatctgcacggtataatgaaaatattaagacagtttcccatgtaatgtattccttcttagattgcatcgaaatgcactatcatatatgcttgtaaatattcaaatgaatttgcactaataaagtcctttgttggtatgtgaattctctttgttgctgttgcaaacagtgcatcttacacaacttcactcaattcaaaagaaaactccattaaaagtactaatgaaaaaacatgacatactgtcaaagtcctcatatctaggaaagacacagaaactctctttgtcacagaaactctctgtgtctttcctagacataatagagttgtttttcaactctatgtttgaatgtggataccctgaattttgtataattagtgtaaatacagtgttcagtccttcaagtgatatttttatttttttattcataccactagctacttgttttctaatctgcttcattctaatgcttatattcatcttttccctaaatttgtgatgctgcagatcctacatcattcagatagaaacctttttttttttcagaattatagaattccacagctcctaccaagaccatgaggataaatatctaacacttttcagttgctgaaggagaaaggagctttagttatgatggataaaaatatctgccaccctaggcttccaaattatacttaaattgtttacatagcttaccacaataggagtatcagggccaaatacctatgtaataatttgaggtcatttctgctttaggaaaagtactttcggtaaattctttggccctgaccagtattcattatttcagataattccctgtgataggacaactagtacatttaatattctcagaacttatggcattttactatgtgaaaactttaaatttatttatattaagggtaatcaaattcttaaagatgaaagattttctgtattttaaaggaagctatgctttaacttgttatgtaattaacaaaaaaatcatatataatagagctctttgttccagtgttatctctttcattgttactttgtatttgcaattttttttaccaaagacaaattaaaaaaatgaataccatatttaaatggaataataaaggttttttaaaaactttaaaaaaaaaaaaa

SEQ ID NO: 367 - DNA, 2116 bp, Homo sapiens
acagtgagcttccttatttgaagcaggactcaattcttggttaaaagctatggtatttgagctagttaaacacatatctctctcccattccatagggaatgagctgggctgtcctttctccccacgttcacctgcacttcgttagagagcagtgttcacatgccacaccacaagatccccacaatgacataactccattcagagactggcgtgactgggctgggtctccccaccccccttcagctcttgtatcactcagaatctggcagccagttccgtcctgacagagttcacagcatatattggtggattcttgtccatagtgcatctgctttaagaattaacgaaagcagtgtcaagacagtaaggattcaaaccatttgccaaaaatgagtctaagtgcatttactctcttcctggcattgattggtggtaccagtggccagtactatgattatgattttcccctatcaatttatgggcaatcatcaccaaactgtgcaccagaatgtaactgccctgaaagctacccaagtgccatgtactgtgatgagctgaaattgaaaagtgtaccaatggtgcctcctggaatcaagtatctttaccttaggaataaccagattgaccatattgatgaaaaggcctttgagaatgtaactgatctgcagtggctcattctagatcacaaccttctagaaaactccaagataaaagggagagttttctctaaattgaaacaactgaagaagctgcatataaaccacaacaacctgacagagtctgtgggcccacttcccaaatctctggaggatctgcagcttactcataacaagatcacaaagctgggctcttttgaaggattggtaaacctgaccttcatccatctccagcacaatcggctgaaagaggatgctgtttcagctgcttttaaaggtcttaaatcactcgaataccttgacttgagcttcaatcagatagccagactgccttctggtctccctgtctctcttctaactctctacttagacaacaataagatcagcaacatccctgatgagtatttcaagcgttttaatgcattgcagtatctgcgtttatctcacaacgaactggctgatagtggaatacctggaaattctttcaatgtgtcatccctggttgagctggatctgtcctataacaagcttaaaaacataccaactgtcaatgaaaaccttgaaaactattacctggaggtcaatcaacttgagaagtttgacataaagagcttctgcaagatcctggggccattatcctactccaagatcaagcatttgcgtttggatggcaatcgcatctcagaaaccagtcttccaccggatatgtatgaatgtctacgtgttgctaacgaagtcactcttaattaatatctgtatcctggaacaatattttatggttatgtttttctgtgtgtcagttttcatagtatccatattttattactgtttattacttccatgaattttaaaatctgagggaaatgttttgtaaacatttattttttttaaagaaaagatgaaaggcaggcctatttcatcacaagaacacacacatatacacgaatagacatcaaactcaatgctttatttgtaaatttagtgtttttttatttctactgtcaaatgatgtgcaaaaccttttactggttgcatggaaatcagccaagttttataatccttaaatcttaatgttcctcaaagcttggattaaatacatatggatgttactctcttgcaccaaattatcttgatacattcaaatttgtctggttaaaaaataggtggtagatattgaggccaagaatattgcaaaatacatgaagcttcatgcacttaaagaagtatttttagaataagaatttgcatacttacctagtgaaacttttctagaattatttttcactctaagtcatgtatgtttctctttgattatttgcatgttatgtttaataagctactagcaaaataaaacatagcaaatggcatcactgtgtttgacttcttgtgaaatttctgtactttgtatataaaatacataaaacaatagattagaaatcaaaagatatctctggcctgca

SEQ ID NO: 368 - DNA, 2298 bp, Homo sapiens
tcggccgagcccagagacagccagttcctctcccgccgcgccgggccgcgtgccgctcgctccccggccgtggcgcctccgggccagacgcgctgcagcctccagcccgcggcaagcgggcggggcggccgcgccacccccggccccgcgccagcagcccctcgccgcgcgtccagcgttcccggccagcagcctccccatacgcagtcctgctggaccgccccgtcgcgccccccactctgaactcaagtcaccgtggagctccgccgccccgaaactttcacgcgagcgggaaatatgggatgtataaaatcaaaagggaaagacagcttgagtgacgatggagtagatttgaagactcaaccagtacgtaatactgaaagaactatttatgtgagagatccaacgtccaataaacagcaaaggccagttccagaatctcagcttttacctggacagaggtttcaaactaaagatccagaggaacaaggagacattgtggtagccttgtacccctatgatggcatccacccggacgacttgtctttcaagaaaggagagaagatgaaagtcctggaggagcatggagaatggtggaaagcaaagtcccttttaacaaaaaaagaaggcttcatccccagcaactatgtggccaaactcaacaccttagaaacagaagagtggtttttcaaggatataaccaggaaggacgcagaaaggcagcttttggcaccaggaaatagcgctggagctttccttattagagaaagtgaaacattaaaaggaagcttctctctgtctgtcagagactttgaccctgtgcatggtgatgttattaagcactacaaaattagaagtctggataatgggggctattacatctctccacgaatcacttttccctgtatcagcgacatgattaaacattaccaaaagcaggcagatggcttgtgcagaagattggagaaggcttgtattagtcccaagccacagaagccatgggataaagatgcctgggagatcccccgggagtccatcaagttggtgaaaaggcttggcgctgggcagtttggggaagtctggatgggttactataacaacagtaccaaggtggctgtgaaaaccctgaagccaggaactatgtctgtgcaagccttcctggaagaagccaacctcatgaagaccctgcagcatgacaagctcgtgaggctctacgctgtggtcaccagggaggagcccatttacatcatcaccgagtacatggccaagggcagtttgctggatttcctgaagagcgatgaaggtggcaaagtgctgcttccaaagctcattgacttttctgctcagattgcagagggaatggcatacatcgagcggaagaactacattcaccgggacctgcgagcagctaatgttctggtctccgagtcactaatgtgcaaaattgcagattttggccttgctagagtaattgaagataatgagtacacagcaagggaaggtgctaagttccctattaagtggacggctccagaagcaatcaactttggatgtttcactattaagtctgatgtgtggtcctttggaatcctcctatacgaaattgtcacctatgggaaaattccctacccagggagaactaatgccgacgtgatgaccgccctgtcccagggctacaggatgccccgtgtggagaactgcccagatgagctctatgacattatgaaaatgtgctggaaagaaaaggcagaagagagaccaacgtttgactacttacagagcgtcctggatgatttctacacagccacggaagggcaataccagcagcagccttagagcacagggagacccgtccatttggcaggggtggctgcctcatttagagaggaaaagtaaccatcactggttgcacttatgatttcatgtgcggggatcatctgccgtgcctggatcctgaaatagaggctaaattactcaggaagaacaccctctaaatgggaaagtattctgtactcttagatggattctccactcagttgcaacttggacttgtcctcagcagctggtaatcttgctctgcttgacaacatctgagtgcagccgtttgagaagaaaacatctattctctccaaaaatgcacccaactagctctatgtttacaaatggacataggactcaaagtttcagagaccattgcaatgaatccccaataattgcagaactaaactcatttataaagctaaaataaccggatatatacatagcatgacatttctttgtgctttggcttacttgttt

SEQ ID NO: 369 - DNA, 1723 bp, Homo sapiens
ggcagagctggaaggtctgtgcaagctggctcctgctggggaatcaataaaggaggcagagcaacgcttttttttttttttcgccgtggccagggcagggttctgccagggctctatcgccaatggagcaggggtccacctggggcctaggacgcctgcagatagccctctcttagccccaacggccgcgggcttcagcgctccccggctccctcgctctgcagggtcttcccggtaccggcaggccgcggcgggagctgctttcgctcttaaccttgcaggtgcgtgtgccgcgggcgcccggggcaggcaggacgcagaggaggaggcgcccgccatgcccggcctgcggctccccgcctcggcttcccgtccgccgcccccgcggaacggcctgctgcagcccctgtgaagaggaagaggcggcggcggcggcggaggaggaggaggcgccgcccccttggcaagctccccgacccggcggcctcggcaggacccatggcggattcctcgcccgcactgtccctgcgggaaggcggcccccgcgcgccgcggccctcggccccctcgccgccgccgcgctcgcgctccggctccgagtccgaggaggccgagctgtcgctgagcctggcccgcaccaagacccgctcgtacggcagcaccgccagcgtgcgggcgccgctgggcgccggcgtcatcgagcgccatgtggagcaccgggtccgcgcgggcgacacgctgcagggcatcgcgctcaagtacggtgtcacgatggaacagattaaaagggccaataaactgtttaccaatgattgtatatttctgaagaaaactttgaacatcccagttatatcagagaagcctttgttgtttaatggacttaactccattgattctccagaaaatgaaactgctgataacagtttttctcaggaagaggagccagtggtggccggggaagacctccctcctcccagtcctcaagaatctgatgttcagcctgtgcagcctgaggaagtgtcagccagagatttcctgcagagacttgacttgcagattaagttatcaacacaggcagccaagaagctaaaagaagagagcagagatgaagaaagtccctatgcaacttccctctatcacagttaggtgatttgggggcataactctaaccaaaattaagatatgtttggaccataaagaatccaacaactgaagattcaaaaacatcccttctggattcctatagtgtccatcttaaaatcataactaggtagttctacctgctgcagttgcactgaagtgattagttccctctggctttctataattttaagtctttattatggcatgatggcaaggttgtagcctaaagctcatcacttttgtaggtggtgttagtttttagactagcttttataaatactaattgacataaagcatcaaagattatttatatatttaggctaaaaataatgtttatctccttatgcaatcctgattatgtgaaaatatggttgctgtttaagtgatgctgaatttgctgtgtgtttataacttaagtgctatatatatatttcgatatgtttacatattctctattaatataaagaaccaaattttgtctgctattttgtaaaaataaactacaaaagcctgaatgagaaaataaactatgttttcaaacttgaaaaaaaaaaaaaaaaaaaaaaaaaaaaaaaaaaaa

SEQ ID NO: 370 - DNA, 1475 bp, Homo sapiens
gcgtggcaggagaggcggggccaattttgctgagctttctcgcgggcttgcagctgcggcaagtgctggcggcggctgctcgcgcaagtcagctggcgtgggaactaccctttgtagctgagaacggcttgtttattgctacaaagactctattgacattggtagcttcagcggcagcagcttcttacggtataaagctgttgcttcctgaagaggctacaagcatccttccctaggactgctgtaagctttgagcctctagcaggagacatgcctcggggacgaaagagtcggcgccgccgtaatgcgagagccgcagaagagaaccgcaacaatcgcaaaatccaggcctcagaggcctccgagacccctatggccgcctctgtggtagcgagcacccccgaagacgacctgagcggccccgaggaagacccgagcactccagaggaggcctctaccacccctgaagaagcctcgagcactgcccaagcacaaaagccttcagtgccccggagcaattttcagggcaccaagaaaagtctcctgatgtctatattagcgctcatcttcatcatgggcaacagcgccaaggaagctctggtctggaaagtgctggggaagttaggaatgcagcctggacgtcagcacagcatctttggagatccgaagaagatcgtcacagaagagtttgtgcgcagagggtacctgatttataaaccggtgccccgtagcagtccggtggagtatgagttcttctgggggccccgagcacacgtggaatcgagcaaactgaaagtcatgcattttgtggcaagggttcgtaaccgatgctctaaagactggccttgtaattatgactgggattcggacgatgatgcagaggttgaggctatcctcaattcaggtgctaggggttattccgccccttaagtagatctgaggcagacccttgggggtgtaaaagagagtcacaggtaccccaaggagtagatgccagggtcctaagttgaaaatgatgtcgattgggggcgggggacactgtatttgatatttgtgatcagtgatcattgttcaactgcgaaatagagtgtttgcttttgataatggaaaattgtattcgttttaaaattccgtttgttgagaataacaatatgtttaaaaatataattgaacaaatttttttctttgtttcctgtcattgacatttagtataacagttttgctaacgttctaaaatgaagtcgttccatcataatctatgatcttgtacagcacttatagaaataagctgttcttttgaagttgaaatacccagtaaaatgttgaagaaggatggaggatttcttcatatctgacgtttctgaaaccctttgtgtctgctgttgtgtgaagattgacatttaccatgattttccttagttactgcagaacatagagaaaaataaaagcctaacgaatagtaaaaaaaaaaaaaa

SEQ ID NO: 371 - DNA, 5215 bp, Homo sapiens
cgagcgcggcgcccttgagctgcaccgcggcgcaggtttgcgagccgacttgtcagccggccaagaaaaggaagctccgtcccttcccgctcacccggcttccccaccccttgtactctaaactctgcagagggcgagcggcgcggccacggaggcgccgaggaggagcgagccgccgccgggcagcggcgtgccctcgggggagagggcgccggagaggaggcggcggcgcggcggcgagggcgcggcgcgcgatggcagctgcttagcccggcgggcgcggagcagccccgagctgtggctggccaggcggtgcggctgggcgggggacgccgccgccgttgctgcccggcccggagagatgagcacggaggcggacgagggcatcactttctctgtgccacccttcgccccctcgggcttctgcaccatccccgagggcggcatctgcaggaggggaggagcggcggcggtgggcgagggcgaggagcaccagctgccaccgccgccgccgggcagcttctggaacgtggagagcgccgctgcccctggcatcggttgtccggcggccacctcctcgagcagtgccacccgaggccggggcagctctgttggcgggggcagccgacggaccacggtggcatatgtgatcaacgaagcgagccaagggcaactggtggtggccgagagcgaggccctgcagagcttgcgggaggcgtgcgagacagtgggcgccaccctggaaaccctgcattttgggaaactcgactttggagaaaccaccgtgctggaccgcttttacaatgcagatattgcggtggtggagatgagcgatgccttccggcagccgtccttgttttaccaccttggggtgagagaaagtttcagcatggccaacaacatcatcctctactgtgatactaactcggactctctgcagtcactgaaggaaataatttgccagaagaatactatgtgcactgggaactacacctttgttccttacatgataactccacataacaaagtctactgctgtgacagcagcttcatgaaggggttgacagagctcatgcaaccgaacttcgagctgcttcttggacccatctgcttacctcttgtggatcgttttattcaacttttgaaggtggcacaagcaagttctagccagtacttccgggaatctatactcaatgacatcaggaaagctcgtaatttatacactggtaaagaattggcagctgagttggcaagaattcggcagcgagtagataatatcgaagtcttgacagcagatattgtcataaatctgttactttcctacagagatatccaggactatgattctattgtgaagctggtagagactttagaaaaactgccaacctttgatttggcctcccatcaccatgtgaagtttcattatgcatttgcactgaataggagaaatctccctggtgacagagcaaaagctcttgatattatgattcccatggtgcaaagcgaaggacaagttgcttcagatatgtattgcctagttggtcgaatctacaaagatatgtttttggactctaatttcacggacactgaaagcagagaccatggagcttcttggttcaaaaaggcatttgaatctgagccaacactacagtcaggaattaattatgcggtcctcctcctggcagctggacaccagtttgaatcttcctttgagctccggaaagttggggtgaagctaagtagtcttcttggtaaaaagggaaacttggaaaaactccagagctactgggaagttggattttttctgggggccagcgtcctagccaatgaccacatgagagtcattcaagcatctgaaaagctttttaaactgaagacaccagcatggtacctcaagtctattgtagagacaattttaatatataagcattttgtgaaactgaccacagaacagcctgtggccaagcaagaacttgtggacttttggatggatttcctggtcgaggccacaaagacagatgttactgtggttaggtttccagtattaatattagaaccaaccaaaatctatcaaccttcttatttgtctatcaacaatgaagttgaggaaaagacaatctctatttggcacgtgcttcctgatgacaagaaaggtatacatgagtggaattttagtgcctcttctgtcaggggagtgagtatttctaaatttgaagaaagatgctgctttctttatgtgcttcacaattctgatgatttccaaatctatttctgtacagaacttcattgtaaaaagttttttgagatggtgaacaccattaccgaagagaaggggagaagcacagaggaaggagactgtgaaagtgacttgctggagtatgactatgaatatgatgaaaatggtgacagagtcgttttaggaaaaggcacttatgggatagtctacgcaggtcgggacttgagcaaccaagtcagaattgctattaaggaaatcccagagagagacagcagatactctcagcccctgcatgaagaaatagcattgcataaacacctgaagcacaaaaatattgtccagtatctgggctctttcagtgagaatggtttcattaaaatcttcatggagcaggtccctggaggaagtctttctgctctccttcgttccaaatggggtccattaaaagacaatgagcaaacaattggcttttatacaaagcaaatactggaaggattaaaatatctccatgacaatcagatagttcaccgggacataaagggtgacaatgtgttgattaatacctacagtggtgttctcaagatctctgacttcggaacatcaaagaggcttgctggcataaacccctgtactgaaacttttactggtaccctccagtatatggcaccagaaataatagataaaggaccaagaggctacggaaaagcagcagacatctggtctctgggctgtacaatcattgaaatggccacaggaaaacccccattttatgaactgggagaaccacaagcagctatgttcaaggtgggaatgtttaaagtccaccctgagatcccagagtccatgtctgcagaggccaaggcattcatactgaaatgttttgaaccagatcctgacaagagagcctgtgctaacgacttgcttgttgatgagtttttaaaagtttcaagcaaaaagaaaaagacacaacctaagctttcagctctttcagctggatcaaatgaatatctcaggagtatatccttgccggtacctgtgctggtggaggacaccagcagcagcagtgagtacggctcagtttcacccgacacggagttgaaagtggaccccttctctttcaaaacaagagccaagtcctgcggagaaagagatgtcaagggaattcggacactctttttgggcattccagatgagaattttgaagatcacagtgctcctccttcccctgaagaaaaagattctggattcttcatgctgaggaaggacagtgagaggcgagctacccttcacaggatcctgacggaagaccaagacaaaattgtgagaaacctaatggaatctttagctcagggggctgaagaaccgaaactaaaatgggaacacatcacaaccctcattgcaagcctcagagaatttgtgagatccactgaccgaaaaatcatagccaccacactgtcaaagctgaaactggagctggacttcgacagccatggcattagccaagtccaggtggtactctttggttttcaagatgctgtcaataaagttcttcggaatcataacatcaagccgcactggatgtttgccttagacagtatcattcggaaggcggtacagacagccattaccatcctggttccagaactaaggccacatttcagccttgcatctgagagtgatactgctgatcaagaagacttggatgtagaagatgaccatgaggaacagccttcaaatcaaactgtccgaagacctcaggctgtcattgaagatgctgtggctacctcaggcgtgagcacgctcagttctactgtgtctcatgattcccagagtgctcaccggtcactgaatgtacagcttggaaggatgaaaatagaaaccaatagattactggaagaattggttcggaaagagaaagaattacaagcactccttcatcgagctattgaagaaaaagaccaagaaattaaacacctgaagcttaagtcccaacccatagaaattcctgaattgcctgtatttcatctaaattcttctggcacaaatactgaagattctgaacttaccgactggctgagagtgaatggagctgatgaagacactataagccggtttttggctgaagattatacactattggatgttctctactatgttacacgtgatgacttaaaatgcttgagactaaggggagggatgctgtgcacactgtggaaggctatcattgactttcgaaacaaacagacttgactgttgctcaatctaatcttcgatggaaattctaaaaattaatacagagctgatcttcttgggggtgggaaaatcgaagggagaggagaaaggcgctgcactttaaatccagtatttgtttactcatgttaaaaaaaaaaaaaacagacaaaacacactgaaatttcctaactacatctatttctataatttttaaggactcttcataaggactcttaaaataatcctgaacattagaaccctaatgttcaggaagattttaatctaagcatttttatggaaatatttttaatgcagcagctattgcacttcagccaaatgtttatttcacacaaaacggatgtaacatttcatgtgatcgtgcaccactggaacaaaaccaaaatgtgaccataactgtttaggcttctgtgtgtttgtaatatgctctaataatctgagtagaaatgcgtaatttcaattactgtataaagtttatgtttttttaagtgtgcagaatctgagagcaatggtttttacttctctgtgttaattgtaatattgactctattttgtaacttaagtttctgacctgtcgtacatttgtttgagtcgtttatgtactactgaactgtaccagttgcacatgcttgaactgtagtaatgttagcttgttctaaagctatccattgtgtcatatttactctaaaaattaaagagactctcaacaaaaaaaaaaaaaaaaaaaaa

SEQ ID NO: 372 - DNA, 2239 bp, Homo sapiens
gcccaagaaacttgttggttgttgccctcaggtcgctcccgggcggggacacggaacccggccatggaagatccgtcgggggctcgcgagccccgggcccggccgagagagcgggacccgggacggcgcccccacccagaccaaggccgcacccacgatcgaccgcgggaccgacccggggacccgcgcaggaagcgaagcagcgacgggaaccggcgaagggacggggaccgggacccggagagagaccaggagagggacgggaaccgcgaccggaaccgggaccgggagagggagagagagagggaaagagacccggaccgaggcccccgccgggacacacacagggacgcgggccctcgcgcaggtgaacacggagtttgggaaaaaccgcgccaaagccggacgcgggacggagcccggggactgacctgggacgcagccgcgcctcctgggcccgcgccctgggaagccccggagccgccgcagccgcagaggaagggagaccccgggcgccgcagacccgaaagtgaacccccttcggagagatatctgccctcgacccccaggcctggacgagaggaggtggaatattaccagtcagaggcggaaggactcctggaatgccacaaatgcaaatacttgtgcactgggagaggtgtggtgcagatagtggaggtggtcttgaatgggatggttctcatatgcatcgtggcctcctactttgtccttgccggattcagtgccagcttttccagcggcggtggctttgggaacaactactactcaccgttcgagggcactgagctagagcaggttcggcagctggaccagcagtacacgatcctccgctcgcccctgatatacggtggcgtggctgtttctctgggtctgggggtcctcaccatgggtgttttactccaaggagccaagagtcgaacaatgttgtcagggaagtggctcctcacggaggccgccttcagcctcctagcggcagtgggctactgcacaggcattggtgtttacctccacgtggctctgcagatcaatagcaccgacacttgcaaaacaagagagaggctctatgcccgcaagggtctcacctggatggactgccagctggcaggcaccgacggagcagcagccacctttgcttgtcttctcgtgatcatgtacggcgccagcgtggtgctggccctgcgtagctaccgagaacagaagcgctacaaaggcagccgagaacagcccggaagttacagtgatgcaccggaatatctgtggtctggaactctttgagatcttccggaacctaaatgtgaacgcacattgtttctctcaaaaagacaggtcttttaaaactccgcattagacaactatggttttcacacacttgactttataaatgctctctttggactgaggcaaagttaaagaattgaggacgggcatggtggctcatgcctgtaatcccagcactttgggaggctgaggtgggcggatcgcttgaggtcagcagattgagtccagcctggctcacatagcgaaaccctgtctctactaaaaatacaaaaaatcgccgggcatggtggctcacgcctgtaatcccagcactttaggaggccaaggcaggcagatcacctgaggtcaggtgtttgaaaccagtctggcaaacatggtgaaaccccatctctactaaaaatacaaaaattagctgggcgtggtggcaggcacctgtaattccagctactctggaggctgaggcaggagaatctcttaaacccgggaggcagaggttgcagtgagccaagaccattgcactccagcctgggcaacaagagcgagactccgtctcaaaaaaatacaaaaaatcatctgggcttggtggtgaacgcctgtaatcccagttactcaggaggctaaaccacaagaatcacttgaacctgggaggcagaggttgcagtgagcaaactccactccacgtcactgcactccagcctgggtaacagagcgaggctctgtctcaaaaacaacaactacaacaaaaaagataggacagtagattttattagaccctgaagcatactggaggctttttcatttctgcattccctgacagtgctccatagagtaggtcttcaaaggtagatagtaatctcattaccctggactgttctcataatgtaacagatcactaacactgaatcttaaaaataaagttcttttagtaattttaaaaaaa

SEQ ID NO: 373 - DNA, 3060 bp, Homo sapiens
acacagagccgcctttcagccgcccgagaactgcccgccgcactccgcgactgcggcgcctgctctcgggccggggtctgcgcgcaccacgcggccggcagaaagggtaagagaagggaaccccgctttgcagggctccaacttcggcggacgcgttacggcgagggcgaaatgagtcggccgtgaacggtgtttcctgttccgaatcccgagagccctggaaagttttgaaggaggaggcatggcccggcagccttatcgttttccccaggcaaggattccggagagaggatcaggtgttttcaggttaaccgtcagaaacgcaatggcacatcgtgattctgagatgaaagaagaatgtctaagggaagacctgaagttttacttcatgagcccttgtgaaaaataccgagccagacgccagattccgtggaaactgggtttgcagattttgaagatagtcatggtcaccacacagcttgttcgttttggtttaagtaaccagctggtggttgctttcaaagaagataacactgttgcttttaagcacttgtttttgaaaggatattctggtacagatgaagatgactacagctgcagtgtatatactcaagaggatgcctatgagagcatcttttttgctattaatcagtatcatcagctaaaggacattaccctggggacccttggttatggagaaaatgaagacaatagaattggcttaaaagtctgtaagcagcattacaagaaagggaccatgtttccttctaatgagacactgaatattgacaacgacgttgagctcgattgtgttcaattagaccttcaggacctctccaagaagcctccggactggaagaactcatcattcttcagactggaattttatcggctcttacaggttgaaatctcctttcatcttaaaggcattgacctacagacaattcattcccgtgagttaccagactgttatgtctttcagaatacgattatctttgacaataaagctcacagtggcaaaatcaaaatctattttgacagtgatgccaaaattgaagaatgtaaagacttgaacatatttggatctactcagaaaaatgctcagtatgtcctggtgtttgatgcatttgtcattgtgatttgcttggcatctcttattctgtgtacaagatccattgttcttgctctaaggttacggaagagatttctaaatttcttcctggagaagtacaagcggcctgtgtgtgacaccgaccagtgggagttcatcaacggctggtatgtcctggtgattatcagcgacctaatgacaatcattggctccatattaaaaatggaaatcaaagcaaagaatctcacaaactatgatctctgcagcatttttcttggaacctctacgctcttggtttgggttggagtcatcagatacctgggttatttccaggcatataatgtgctgattttaacaatgcaggcctcactgccaaaagttcttcggttttgtgcttgtgctggtatgatttatctgggttacacattctgtggctggattgtcttaggaccataccatgacaagtttgaaaatctgaacacagttgctgagtgtctgttttctctggtcaacggtgatgacatgtttgcaacctttgcccaaatccagcagaagagcatcttggtgtggctgttcagtcgtctgtatttatattccttcatcagcctttttatatatatgattctcagtctttttattgcacttattacagattcttatgacaccattaagaaattccaacagaatgggtttcctgaaacggatttgcaggaattcctgaaggaatgcagtagcaaagaagagtatcagaaagagtcctcagccttcctgtcctgcatctgctgtcggaggaggaaaagaagtgatgatcacttgatacctattagctaaagttctgctaaagatgattaaagttcaggcatccttatccagcggctgagcagaggaaccccaaatgacttggacaagcagttccaaaatgactctcttatttaattgtggagtgggaaagaggactcacagttagccagctgaccatgactgaagttccagctttactttttataaacttgaatgataaagaatagaccatgggctactactgggcattagtgcaatataacagcgataataaaattctctattagtctgttaatttatgacatgatctcggaatggaaaaagatcatttcagagtgtgcgaaataatagtctttaaccatgtaattaaatatgtgtgtttattgtcaaataaggatttgttttaaaggtgattcttgggtttgaagacatttgttaattcatggtctgtacagaaatgaagctggttgcaataccaatctagagagtccaagctggcgaactattaagctgtttaaagatcacccttggcctggcacagtggttcacacctgtaatcccagcactttgggaggcctaggcaggcagactgagctcaggagcttgagaccagcctgggcaacatggcaaaaacccacctctacaaaaagtacaaaaattagtcgggcgtgatggcaggcatctgtagtcccagctacttgggaagctgaagtgggaggatcacctgagctctggaggtggaggctgccatgagccatgatcgtgccactacactccagcctgggtgacagagtgagatcctgtctcaaaaaaaaaaaaaaatcacccttaaatcaacaaaaagacctcatgctcatgcagtggacatttcttggcctgttttcctgtgggttttcttcagcatgatatgaagcaactgttggcatagccagtgggataaataagaaatggaatcatttggctgcctcgtcacttgtgctaatggtcagttgtacacacatgacatgtggaagtgacctgtagcagcggtcactcattttaacaattgaactctgctgggttgggtatttacctttgtctagaaaagaaatatgatatattttctctaaataaatttattttcatcattccaaaaaaaaaaaaaaaaa

SEQ ID NO: 374 - DNA, 3060 bp, Homo sapiens; identical to SEQ ID NO: 373

SEQ ID NO: 375 - DNA, 2090 bp, Homo sapiens
gctcctcaccccgcctgctccgcagcgggaccgcgtagacctcagctccccgagcagcgcaggtgggccagggaaggagaggaccgaggtctgccaaggaccatgggtgccgcgctggggacaggcacgcggctggctccctggccgggccgggcctgcggcgccctcccgcgctggacacccaccgcgcccgcccaaggctgccactccaagcctggcccggcgcgccctgtgcccctgaagaagcgcggatacgatgtcaccaggaaccctcatctcaacaaggggatggcctttacccttgaagaaaggctgcagcttggaatccacggcctaatcccgccctgctttctgagccaggacgtccagctcctccgaatcatgagatattacgagcggcagcagagtgacctggacaagtacatcattctcatgacactccaagaccggaacgagaagctcttctaccgagtgctgacttcggacgtggagaagttcatgccaatcgtgtacacgcctaccgtggggctggcctgtcagcactatggcctgactttccgcaggccccgtggactgttcatcaccattcatgacaaaggtcatcttgcaacaatgctgaattcttggccagaagacaatattaaggccgtggtggtgactgatggggagcgcatcctgggcctgggagacctgggctgctacggcatgggcatccctgtgggcaagctggccctgtacacggcatgcggaggggtgaacccgcagcagtgcctccctgtgctgctggacgtcggcaccaacaatgaggagctgctcagagaccctctgtacatcggcctgaaacaccagcgcgtgcacgggaaggcatacgatgacttgctggatgagttcatgcaggctgtgacagacaagtttggaataaattgcctcatccaatttgaagacttcgccaatgccaatgccttccgcctgctcaacaaataccgtaacaagtactgcatgttcaatgatgacatccaaggcacagcctccgttgctgtggcagggatcttggctgctctgcgaatcaccaagaacaagctttccaatcacgtgtttgttttccaaggtgcaggcgaggcagctatgggcattgcccacctccttgtcatggccctagagaaagaaggtgtaccgaaggcagaggccacaagaaagatctggatggtggactctaaagggctcattgtcaaggggaggagccacctgaaccatgaaaaggagatgtttgcccaagaccatcctgaagtcaactccctggaggaggtggtgaggctggtgaagcccacagccatcataggtgttgctgccatcgcaggagccttcacggagcagattctgagggacatggcctccttccacgagcgccctatcatctttgccctgagcaaccccaccagcaaggccgagtgcacggctgagaagtgctaccgggtcaccgagggccgagggatttttgccagtggaagtccttttaagagtgtgactctggaagatggcaagaccttcattcctgggcagggaaacaatgcttacgtgttccccggggtggcactgggagtcatcgccggcgggatccggcacatcccagatgagatcttcctcctgacagcagagcaaattgcccaggaagtctctgagcagcatctgtcccaggggagactctacccaccactcagcaccatccgagacgtgtctttgagaattgccatcaaagttctcgactacgcgtacaaacacaacctggcttcctactacccagagcctaaggacaaggaggcttttgtaagatccctggtctacactccagactatgactcctttacactggacagctacacttggcccaaggaagccatgaatgttcagacggtctgaggcagtctcagaggctagtatggggctagatgaagcccagagtaacacccacaatataaatgggttccaaaatggcccaagtgaatccttgtcgctgtgttttttcttttaaactttctggtgtgagaggagatgccaaggcatacagtgaataaaagccttgtctctgaaaa

SEQ ID NO: 376 - DNA, 2242 bp, Homo sapiens
caccggatctgcttccagggcttggtttcgctttgcctggctcttggctaggcctggcgccccgcgcggagccgagcaggtggcagccgaggagtggcgggggctggaacatttaaccctttgggagcacctgccctctcccagagggcgcgtccccggatcaggcccggtgccccgcagcgcgcgtgggtcctggctggctggaaggaggccctgaccttgctttctctcccgtgccaggtctgccaaggaccatgggtgccgcgctggggacaggcacgcggctggctccctggccgggccgggcctgcggcgccctcccgcgctggacacccaccgcgcccgcccaaggctgccactccaagcctggcccggcgcgccctgtgcccctgaagaagcgcggatacgatgtcaccaggaaccctcatctcaacaaggggatggcctttacccttgaagaaaggctgcagcttggaatccacggcctaatcccgccctgctttctgagccaggacgtccagctcctccgaatcatgagatattacgagcggcagcagagtgacctggacaagtacatcattctcatgacactccaagaccggaacgagaagctcttctaccgagtgctgacttcggacgtggagaagttcatgccaatcgtgtacacgcctaccgtggggctggcctgtcagcactatggcctgactttccgcaggccccgtggactgttcatcaccattcatgacaaaggtcatcttgcaacaatgctgaattcttggccagaagacaatattaaggccgtggtggtgactgatggggagcgcatcctgggcctgggagacctgggctgctacggcatgggcatccctgtgggcaagctggccctgtacacggcatgcggaggggtgaacccgcagcagtgcctccctgtgctgctggacgtcggcaccaacaatgaggagctgctcagagaccctctgtacatcggcctgaaacaccagcgcgtgcacgggaaggcatacgatgacttgctggatgagttcatgcaggctgtgacagacaagtttggaataaattgcctcatccaatttgaagacttcgccaatgccaatgccttccgcctgctcaacaaataccgtaacaagtactgcatgttcaatgatgacatccaaggcacagcctccgttgctgtggcagggatcttggctgctctgcgaatcaccaagaacaagctttccaatcacgtgtttgttttccaaggtgcaggcgaggcagctatgggcattgcccacctccttgtcatggccctagagaaagaaggtgtaccgaaggcagaggccacaagaaagatctggatggtggactctaaagggctcattgtcaaggggaggagccacctgaaccatgaaaaggagatgtttgcccaagaccatcctgaagtcaactccctggaggaggtggtgaggctggtgaagcccacagccatcataggtgttgctgccatcgcaggagccttcacggagcagattctgagggacatggcctccttccacgagcgccctatcatctttgccctgagcaaccccaccagcaaggccgagtgcacggctgagaagtgctaccgggtcaccgagggccgagggatttttgccagtggaagtccttttaagagtgtgactctggaagatggcaagaccttcattcctgggcagggaaacaatgcttacgtgttccccggggtggcactgggagtcatcgccggcgggatccggcacatcccagatgagatcttcctcctgacagcagagcaaattgcccaggaagtctctgagcagcatctgtcccaggggagactctacccaccactcagcaccatccgagacgtgtctttgagaattgccatcaaagttctcgactacgcgtacaaacacaacctggcttcctactacccagagcctaaggacaaggaggcttttgtaagatccctggtctacactccagactatgactcctttacactggacagctacacttggcccaaggaagccatgaatgttcagacggtctgaggcagtctcagaggctagtatggggctagatgaagcccagagtaacacccacaatataaatgggttccaaaatggcccaagtgaatccttgtcgctgtgttttttcttttaaactttctggtgtgagaggagatgccaaggcatacagtgaataaaagccttgtctctgaaaa

SEQ ID NO: 377 - DNA, 2330 bp, Homo sapiens
aaaggaccgaggcgtgcagcggacagcagatggatcccgcggccagcagctgcatgaggagcctccagcccccagcccctgtctggggctgccttcgaaacccccactcggaaggcaatggggcctcagggctaccccactacccgcccaccccgttctccttccaccagaaaccagacttcctggcgacagcgacggcagcgtaccctgacttctcagcctcctgcctggcagccaccccacacagcctgccccaggaggagcacatcttcactgagcagcaccccgctttcccacagtcccccaactggcacttccctgtctcagacgcccggcgcaggcccaactcaggcccggcagggggttccaaggaaatggggaccagcagcctgggcctggtggacaccacaggaggcccaggcgatgactacggggtgcttgggagcactgccaatgagacagagaagaaatcatccaggcggagaaaggagagttcagacaaccaggagaacagagggaagccggagggcagcagcaaagcccgcaaggagaggacggccttcaccaaggagcagctgcgagagctggaggcagagtttgcccatcataactacctgactcggctccgcagatatgagattgcggtaaacctggacctctctgagcgccaggtcaaagtgtggttccagaaccgaaggatgaagtggaagcgtgtgaagggaggtcagcccatctcccccaatgggcaggaccctgaggatggggactccacagcctctccaagttcagagtgagattctgcatggaggaaaaatgactaaggactgagccccctacccaactacccccaccccaatcccaccttcaccctcttccttccccagccagggcagcctctccacatctttccctgactcttggatatgaaactgcccagcattcctgggagtcttaggattttctaggaagttctgtccagcctcttagcagcctcttccctagggcctttgctcccacactctcatggaatcagacagagatcctaccgggccggatgaatctggaaacagcttcagagatactgcttctcagcgtctcttggctgccacccatgcctcctcctaccgctgttctcctaggtcagccaggcctcctcctggtctggacaccacctggcctggtgggagaggagctttggaaccagctggcgactcggaaagtaaatgcttcaaaaggaaggaaatgacagagacacacgcccttgcccaccttcctctgtaggctgcacatctgaggctttggggccccttagttgtcccgaaaccccaagaaaaatcagaatgaggagagtcaaggacagcaactcagctgctgcaagccagaaacacatccctgtctccaaatttgttggctaagtggagacacttctgagaactgactagagaagacagaaaaatagcccgatgtaggtttcggtgtccccatataggcccgtccacacaggcttgactgggtggacaagaatgaacccatgacagcacctgctgcttcaaaatcaaaatcaatttagggatacagcaggggctgttgggctgtgctccagagaaaaggagcagctactccttttaaatccacgatttctggattgaaaacctgtccagatgctgagttgttgggctgaacaactaggagctgaaaacaacgtagaggctggaaagtgtcccctgcattctggaggggaggggagataataaggagggctgctgggtgagggcctggagatgtggaaccctggagtggaaggttctccagtgacagtgtcctgtgactgcaaaaggggacaagaaaatccctcttcctccatgggatggatttaagctcttgctgtgtgttctacaaatgctgttattgtgggaggaaatgctaggtttttgtgtgtggactgcccagacctcagccaggtcttctggagatgacatttgaggactgatggccaaagagcatgggggactgaagccctggctgcctcagcgctctgtctcccaacaccagctggtgttgcagagggaggtcaacgtgagtttggatctcttgtacgcagatgtaatcattcacatgtaaaaataaccccacctccccaccccaaaaagggcaagagctgtggaaaatgattgccaaatgagatggctggttagagcatgattttttctaaagcatacttcatatattttcttaagattacatcaagctaattgtgcgagctcaattcactttgtaagaaaactctcggagaaataaaatcaataaaaagcaaaaaaaaaaaaaaaaaa

SEQ ID NO: 378 - DNA, 2184 bp, Homo sapiens
ccaggacgaactcctcgtcagctgaaaccagacttcctggcgacagcgacggcagcgtaccctgacttctcagcctcctgcctggcagccaccccacacagcctgccccaggaggagcacatcttcactgagcagcaccccgctttcccacagtcccccaactggcacttccctgtctcagacgcccggcgcaggcccaactcaggcccggcagggggttccaaggaaatggggaccagcagcctgggcctggtggacaccacaggaggcccaggcgatgactacggggtgcttgggagcactgccaatgagacagagaagaaatcatccaggcggagaaaggagagttcagacaaccaggagaacagagggaagccggagggcagcagcaaagcccgcaaggagaggacggccttcaccaaggagcagctgcgagagctggaggcagagtttgcccatcataactacctgactcggctccgcagatatgagattgcggtaaacctggacctctctgagcgccaggtcaaagtgtggttccagaaccgaaggatgaagtggaagcgtgtgaagggaggtcagcccatctcccccaatgggcaggaccctgaggatggggactccacagcctctccaagttcagagtgagattctgcatggaggaaaaatgactaaggactgagccccctacccaactacccccaccccaatcccaccttcaccctcttccttccccagccagggcagcctctccacatctttccctgactcttggatatgaaactgcccagcattcctgggagtcttaggattttctaggaagttctgtccagcctcttagcagcctcttccctagggcctttgctcccacactctcatggaatcagacagagatcctaccgggccggatgaatctggaaacagcttcagagatactgcttctcagcgtctcttggctgccacccatgcctcctcctaccgctgttctcctaggtcagccaggcctcctcctggtctggacaccacctggcctggtgggagaggagctttggaaccagctggcgactcggaaagtaaatgcttcaaaaggaaggaaatgacagagacacacgcccttgcccaccttcctctgtaggctgcacatctgaggctttggggccccttagttgtcccgaaaccccaagaaaaatcagaatgaggagagtcaaggacagcaactcagctgctgcaagccagaaacacatccctgtctccaaatttgttggctaagtggagacacttctgagaactgactagagaagacagaaaaatagcccgatgtaggtttcggtgtccccatataggcccgtccacacaggcttgactgggtggacaagaatgaacccatgacagcacctgctgcttcaaaatcaaaatcaatttagggatacagcaggggctgttgggctgtgctccagagaaaaggagcagctactccttttaaatccacgatttctggattgaaaacctgtccagatgctgagttgttgggctgaacaactaggagctgaaaacaacgtagaggctggaaagtgtcccctgcattctggaggggaggggagataataaggagggctgctgggtgagggcctggagatgtggaaccctggagtggaaggttctccagtgacagtgtcctgtgactgcaaaaggggacaagaaaatccctcttcctccatgggatggatttaagctcttgctgtgtgttctacaaatgctgttattgtgggaggaaatgctaggtttttgtgtgtggactgcccagacctcagccaggtcttctggagatgacatttgaggactgatggccaaagagcatgggggactgaagccctggctgcctcagcgctctgtctcccaacaccagctggtgttgcagagggaggtcaacgtgagtttggatctcttgtacgcagatgtaatcattcacatgtaaaaataaccccacctccccaccccaaaaagggcaagagctgtggaaaatgattgccaaatgagatggctggttagagcatgattttttctaaagcatacttcatatattttcttaagattacatcaagctaattgtgcgagctcaattcactttgtaagaaaactctcggagaaataaaatcaataaaaagcaaaaaaaaaaaaaaaaaa

SEQ ID NO: 379 - DNA, 2157 bp, Homo sapiens
aaaggaccgaggcgtgcagcggacagcagatggatcccgcggccagcagctgcatgaggagcctccagcccccagcccctgtctggggctgccttcgaaacccccactcggaaggcaatggggcctcagggctaccccactacccgcccaccccgttctccttccaccagaaaccagacttcctggcgacagcgacggcagcgtaccctgacttctcagcctcctgcctggcagccaccccacacagcctgccccaggaggagcacatcttcactgagcagcaccccgctttcccacagtcccccaactggcacttccctgtctcagacgcccggcgcaggcccaactcaggcccggcagggggttccaaggaaatggggaccagcagcctgggcctggtggacaccacaggaggcccaggcgatgactacggggtgcttgggagcactgccaatgagacagagaagaaatcatccaggcggagaaaggagagttcaggtcaaagtgtggttccagaaccgaaggatgaagtggaagcgtgtgaagggaggtcagcccatctcccccaatgggcaggaccctgaggatggggactccacagcctctccaagttcagagtgagattctgcatggaggaaaaatgactaaggactgagccccctacccaactacccccaccccaatcccaccttcaccctcttccttccccagccagggcagcctctccacatctttccctgactcttggatatgaaactgcccagcattcctgggagtcttaggattttctaggaagttctgtccagcctcttagcagcctcttccctagggcctttgctcccacactctcatggaatcagacagagatcctaccgggccggatgaatctggaaacagcttcagagatactgcttctcagcgtctcttggctgccacccatgcctcctcctaccgctgttctcctaggtcagccaggcctcctcctggtctggacaccacctggcctggtgggagaggagctttggaaccagctggcgactcggaaagtaaatgcttcaaaaggaaggaaatgacagagacacacgcccttgcccaccttcctctgtaggctgcacatctgaggctttggggccccttagttgtcccgaaaccccaagaaaaatcagaatgaggagagtcaaggacagcaactcagctgctgcaagccagaaacacatccctgtctccaaatttgttggctaagtggagacacttctgagaactgactagagaagacagaaaaatagcccgatgtaggtttcggtgtccccatataggcccgtccacacaggcttgactgggtggacaagaatgaacccatgacagcacctgctgcttcaaaatcaaaatcaatttagggatacagcaggggctgttgggctgtgctccagagaaaaggagcagctactccttttaaatccacgatttctggattgaaaacctgtccagatgctgagttgttgggctgaacaactaggagctgaaaacaacgtagaggctggaaagtgtcccctgcattctggaggggaggggagataataaggagggctgctgggtgagggcctggagatgtggaaccctggagtggaaggttctccagtgacagtgtcctgtgactgcaaaaggggacaagaaaatccctcttcctccatgggatggatttaagctcttgctgtgtgttctacaaatgctgttattgtgggaggaaatgctaggtttttgtgtgtggactgcccagacctcagccaggtcttctggagatgacatttgaggactgatggccaaagagcatgggggactgaagccctggctgcctcagcgctctgtctcccaacaccagctggtgttgcagagggaggtcaacgtgagtttggatctcttgtacgcagatgtaatcattcacatgtaaaaataaccccacctccccaccccaaaaagggcaagagctgtggaaaatgattgccaaatgagatggctggttagagcatgattttttctaaagcatacttcatatattttcttaagattacatcaagctaattgtgcgagctcaattcactttgtaagaaaactctcggagaaataaaatcaataaaaagcaaaaaaaaaaaaaaaaaa

SEQ ID NO: 380 - DNA, 2327 bp, Homo sapiens
tcaaccctgaatgtcatagttagctactttcaactggaagctacaacatggatttatggaatctgtcttggtttctgttcttggatgctcttctcgtgatttctggcttggcaactccagaaaactttgatgtagatggcggaatggaccaggacatatttgatatcaatgaaggtttgggactggatctttttgagggtgacatcagacttgatagggcacaaattagaaattccatcattggagaaaagtatagatggcctcataccattccatatgttctagaagatagcttggaaatgaatgctaagggagttatcctcaatgcatttgaacgttatcgccttaaaacatgtattgactttaagccttgggctggagaaacaaactatatatcagtgttcaagggcagtggctgctggtcttcagtaggaaataggcgggttgggaagcaagaactttccatcggggcaaactgtgaccgaatagcaacagttcaacacgagttcctccacgctctgggattctggcatgagcagtcgcgttctgaccgggatgactatgtcaggataatgtgggacagaattctgtcaggcagagagcacaattttaacacctatagtgacgatatatcagattccctgaatgttccctatgattacacttcagtaatgcactacagtaaaactgcattccaaaatggaacagagccgacaattgtcacaagaatctcagactttgaggatgtgatcggccaacgaatggatttcagtgactctgatctcctaaagttgaatcaactgtataactgctcctcttccttgagttttatggactcgtgcagttttgaactggaaaatgtgtgtggcatgatccaaagttcaggagataatgctgactggcaacgggtttcacaggttcccagggggccagagagtgatcactccaacatgggccagtgccaaggttctggtttcttcatgcatttcgatagcagctctgtaaatgtgggggccacagcagtgctggaaagtagaacgctgtaccctaaaagaggatttcagtgcctgcaattttacttatataacagtggcagtgaaagtgatcaactgaacatctatatcagggagtattctgcagacaatgtggatggcaatttaacccttgtggaagaaataaaagaaatacccactgggagctggcaactttatcatgtaacattgaaagtgaccaagaagtttagagtggtgtttgaaggacgcaaaggctctggtgcatcactgggtggtctgtctattgatgacatcaatctttcggaaacacggtgccctcatcatatctggcatataaggaatttcacacagttcattggcagcccaaatggaactctgtatagccctccattttactcttctaaaggttatgcctttcagatttacttaaatctagcccatgtgactaatgcagggatatatttccacttgatctctggagccaatgatgatcaattacagtggccatgtccttggcaacaagccacaatgacacttttggatcaaaatcctgacattcgacagcgtatgtccaatcagcggagtataactacagacccatttatgaccaccgataatggaaactatttctgggacaggccttctaaagtgggaacagtggctttgttctctaatggaactcagtttagaagaggtgggggctatggaaccagtgcctttataacccacgaaaggctgaaaagcagagattttataaaaggagatgatgtttatatcctactgacagtggaagacatatctcacctcaactctacacaaatccagctaacaccagcccctagtgttcaagacctctgctcaaaaaccacctgtaaaaatgacggtgtctgcactgttcgagatggcaaagctgagtgcaggtgccagtcaggggaagactggtggtacatgggagaaaggtgtgaaaagagaggctccacccgagacaccatagtcattgctgtttcatctactgttgctgtgtttgccttgatgctgatcatcacccttgtcagtgtctattgcaccaggaagaaatatcgtgaaaggatgagctcaaatcgaccaaatttgactccgcaaaatcagcatgctttttgaagattaactcgacaatatggccagctaatgaaattaaaaaggattcttcatcatggatttcgcctaagtgatattacagccacctcattcttctaaaagtggatatttttctgtaaatagctggaaatattataaatcactattttggtcaaagtcaaaaaaaaaaaaaaaaaa

SEQ ID NO: 381 - DNA, 1440 bp, Homo sapiens
gtcaagtaggagacaaggagcaaagtcctatcacagcgggaggggacgccagcgcctgcagaggctgagcagggaaaaagccagtgccccagcggaagcacagctcagagctggtctgccatggacatcctggtcccactcctgcagctgctggtgctgcttcttaccctgcccctgcacctcatggctctgctgggcctggcagcccctgtgcaaaagctacttcccctacctgatggccgtgctgactcccaagagcaaccgcaagatggagagcaagaaacgggagctcttcagccagataaaggggcttacaggagcctccgggaaagtggccctactggagctgggctgcggaaccggagccaactttcagttctacccaccgggctgcagggtcacctgcctagacccaaatccccactttgagaagttcctgacaaagagcatggctgagaacaggcacctccaatatgagcggtttgtggtggctcctggagaggacatgagacagctggctgatggctccatggatgtggtggtctgcactctggtgctgtgctctgtgcagagcccaaggaaggtcctgcaggaggtccggagagtactgagaccgggaggtgtgctctttttctgggagcatgtggcagaaccatatggaagctgggccttcatgtggcagcaagttttcgagcccacctggaaacacattggggatggctgctgcctcaccagagagacctggaaggatcttgagaacgcccagttctccgaaatccaaatggaacgacagccccctcccttgaagtggctacctgttgggccccacatcatgggaaaggctgtcaaataatctttcccaagctccaaggcactcatttgctccttccccagcctccaattagaacaagccacccaccagcctatctatcttccactgagagggacctagcagaatgagagaagacattcatgtaccacctactagtccctctctccccaacctctgccagggcaatctctaacttcaatcccgccttcgacagtgaaaaagctctacttctacgctgacccagggaggaaacactaggaccctgttgtatcctcaactgcaagtttctggactagtctcccaacgtttgcctcccaatgttgtccctttccttcgttcccatggtaaagctcctctcgctttcctcctgaggctacacccatgcgtctctaggaactggtcacaaaagtcatggtgcctgcatccctgccaagcccccctgaccctctctccccactaccaccttcttcctgagctgggggcaccagggagaatcagagatgctggggatgccagagcaagactcaaagaggcagaggttttgttctcaaatattttttaataaatagacgaaaccacgaaaaaaaaaaaaaaaaaaaaaaaaaaaa

SEQ ID NO: 382 - DNA, 1830 bp, Homo sapiens
agccactctgagcagaactgacagcatgaaggcactcctggccctgccgctgctgctgcttctctccacgcccccgtgtgccccccaggtctccgggatccgaggagatgctctggagaggttttgccttcagcaacccctggactgtgacgacatctatgcccagggctaccagtcagacggcgtgtacctcatctacccctcgggccccagtgtgcctgtgcccgtcttctgtgacatgaccaccgagggcgggaagtggacggttttccagaagagattcaatggctcagtaagtttcttccgcggctggaatgactacaagctgggcttcggccgtgctgatggagagtactggctggggctgcagaacatgcacctcctgacactgaagcagaagtatgagctgcgagtggacttggaggactttgagaacaacacggcctatgccaagtacgctgacttctccatctccccgaacgcggtcagcgcagaggaggatggctacaccctctttgtggcaggctttgaggatggcggggcaggtgactccctgtcctaccacagtggccagaagttctctaccttcgaccgggaccaggacctctttgtgcagaactgcgcagctctctcctcaggagccttctggttccgcagctgccactttgccaacctcaatggcttctacctaggtggctcccacctctcttatgccaatggcatcaactgggcccagtggaagggcttctactactccctcaaacgcactgagatgaaaatccgccgggcctgaagggctggccccctcaggcacctttcctcccctggacacccatggtctccatgagtgctccctctgctgcccctgatgcatgcttctgctgattcccgagcaccaactccttacaagggggccttgtggctctcagccatgccacatccctgtcacacacccagggcatccattcctaagccagacccggctcccctacacctgaagttacactgccagcagttccccaggcctcttccgagaggcacatggttctagcctggacctggctgggctccatgagaatgagttgcctccaccctgtcccaacagctgacagccaggagccactctcccagctgcaggcctttgtggtccatcttgtcctgcttcctcactgtggacccctgtctgggccaccctagtgtgctaagctgagcagtgcagtgtgaacagggcccatggtgtattctaggccacagcccagcactcctctgggctgctctcaaaccatgtcccatcttcagcatccctcccaccaacttactcccctgtggtgagtaccgtggaaccccagcccacctcactatcatactcagcttcccctgatggcccatcccagcccctgaagctctatgccaagaacacagctaccgcacaccaccctgaaacagccacagccaaggtaggcatgcatatgaggtcttccccataccctctgggtgttgagaggtttagccacatgagggagcagaggacaatctctgcagggctgggagtgggtagggactgaaggtctcaataaaccttcagaacctgaatgaactggcttcatacacacaaacatatttgtttatcccccaaatgtaggcacctggctcctccttgctcccctgctgatggtgtcctaccccgaactccaaaaattacacctggagtcaggtgcagaagggaaccttgtatttcacaggcctcattttgatggcaaaaagacagtgtaataataacataataataataaaaatataatactgaaaaggaaaaaaaaaaaaaaaaaa

SEQ ID NO: 383 - DNA, 3075 bp, Homo sapiens
gcttctccggctgctacctaccgcgccggacgctcgggctgcggaacagggcggcactggcccgccacagcgacgccggcgccgagggacaccgcagtatgaggcagagattaacgtgacagtgtcaggtggacccacagccatcccacctccccctctggggagtgctgagagtgaggcagcatggaggagaggaagcatgagaccatgaacccagctcatgtcctctttgaccggtttgtccaggccaccacctgcaagggaaccctcaaggctttccaggagctctgtgaccacctggaactaaagccaaaggactaccgctccttctatcacaagctcaagtccaagcttaactactggaaagccaaagccctctgggcaaaattggacaaacggggcagtcacaaagactacaaaaagggaaaagcgtgcactaacaccaagtgtctcatcattggggctggcccctgtggtctccgtacagccatcgacttatccttactgggggccaaggtggttgttattgagaaacgagatgccttctcccgcaacaacgtcttgcatctctggccattcaccatacatgatctacgaggtctgggtgccaagaagttctatggcaagttctgtgctggagccatcgaccatatcagtatccgtcagctccaactaatacttttgaaagtagccttgatcctaggcattgaaatccacgtcaatgtggaattccaaggacttatacagcctcctgaggaccaagagaatgaacggataggctggcgggcactggtgcaccccaagactcatcctgtgtcagagtatgaatttgaagtgatcatcggtggggatggtcggaggaacaccttggaagggtttcgtcggaaagaattccgtggcaaactggccatcgccatcacggcaaattttatcaaccgaaatacaacagcagaagctaaagtggaagagatcagtggtgtggcttttatattcaaccaaaaatttttccaggaactgagggaagccacaggtattgacttggagaacatcgtttactacaaagatgacacacactatttcgttatgacagccaaaaagcagagtttgctggacaaaggagtgatactacatgactacgccgacacagagctcctgctttcccgagaaaacgtggaccaggaggctctgctcagctatgccagggaggcggcagacttctctacccagcagcagctgccgtctctggattttgccatcaatcactatgggcagcccgatgtggccatgtttgacttcacttgtatgtatgcctccgagaacgccgccttggtgcgggagcagaacggacaccagttactagtggctctggtcggggacagcctcctagagcctttctggccaatgggaacaggaatagcccggggctttctagctgctatggactctgcctggatggtccgaagttggtctctaggaacgagccctttggaagtgctggcagagagggaaagtatttacaggttgctgcctcagaccacccctgagaatgtgagtaagaacttcagccagtacagtatcgaccctgtcactcggtatcccaatatcaacgtcaacttcctccggccaagccaggtgcgccatttatatgatactggcgaaacaaaagatattcacctggaaatggagagcctggtgaattcccgaaccacccccaaattgactcgcaatgagtctgtagctcgttcaagcaaactgctgggttggtgccagaggcagacagatggctatgcaggggtaaacgtgacagatctcaccatgtcctggaaaagtggcttggccctttgtgcaattatccatagataccgccctgacctgatagattttgattctttggatgagcaaaatgtggagaagaataaccaactggcctttgacattgctgagaaggaattgggcatttctcccatcatgacaggcaaagaaatggcctccgtgggggagcctgataagctgtccatggtgatgtacctgactcagttctacgagatgtttaaggactccctcccctctagcggtaaggcctggaaggagctcaccggagaacgatgtcccttttcccttcagcactctgctgtaactaacaatcacagccagcttccaacttttgaaaagaaaaggacttggatggtgctgggaagaggagaaagaccagtcaatcagaggagacaagagtctttctccattgcccaggctggacaattctcctgcctcagcctcccaagtagctgggattgcaggatggacgttgccgttgggaaccagaacaaagtgaagtacatggcgacccagctgctggccaaatttgaagagaatgcgcccgcacagtccatcggcatacggagacagaatgagtccccctcttccccacacctccactcacgtcactttcgcaagtgtcatccccagggctccatgaagaaggagttcccgcagaacctgggaggcagcgacacatgctacttctgccagaagcgggtctacgtgatggagaggctgagtgccgagggcaagttcttccaccggagctgcttcaagtgcgagtactgcgccaccaccctgcgcctctcggcctacgcctacgacatcgaggatggtaaattctactgtaagccacactactgctatcgactctctggctacgcacaaaggaagagaccggcagtggctcccctgtctggaaaggaggccaaaggacccctgcaggatggcgccaccacagatgcaaacggacgggccaacgccgtggccagctccactgagagaaccccaggtagcctcacttccttgtttggctgggtggcgcgtcactccctcggcctctgtgacaaggccaagggcatgagccagcacctccaaagcaacatttcttcattcgggcaacaagtggcccaaaaccctctggactcctttttcatgtgccagctgcttgcgttcggagtcccctttctctatggcctgtcggaggtgctggtgcaaatcagaggggagttccactggcaggctgtggcccagtga

SEQ ID NO: 384 - DNA, 4700 bp, Homo sapiens
cagacctattccgctccatctctgaagtcaaatgggacaccttgaaaatacttcagtggttttcccacgagctattttctctctctgtgaaaaggaaaccaggaaattgactctgtgcctgttttcaagaagcagttccgccgagcatcctggggcctccaagcctccgataagctcctccagtatgacatcacgcatcttgctacgccagcaactcatgcgtgagcagatgcaggagcaggagcgcagggagcagcagcagaagctgcaggcggcccagttcatgcaacagagagtgcccgtgagtcagacaccagccataaacgtcagtgtgcccaccacccttccctctgccacgcaggtgccgatggaagtccttaaggtgcagacccacctcgaaaaccccaccaagtaccacatacagcaagcccaacggcagcaggtaaagcagtacctttctaccactttagcaaataaacatgccaaccaagtcctgagcttgccatgtccaaaccagcctggcgatcatgtcatgccaccggtgccggggagcagcgcacccaacagccccatggctatgcttacgcttaactccaactgtgaaaaagagggattttataagtttgaagagcaaaacagggcagagagcgagtgcccaggcatgaacacacattcacgagcgtcctgtatgcagatggatgatgtaatcgatgacatcattagcctagaatcaagttataatgaggaaatcttgggcttgatggatcctgctttgcaaatggcaaatacgttgcctgtctcgggaaacttgattgatctttatggaaaccaaggtctgcccccaccaggcctcaccatcagcaactcctgtccagccaaccttcccaacataaaaagggagctcacagagtctgaagcaagagcactggccaaagagaggcagaaaaaggacaatcacaacctgattgaacgaagaagaagatttaacataaatgaccgcattaaagaactaggtactttgattcccaagtcaaatgatccagacatgcgctggaacaagggaaccatcttaaaagcatccgtggactatatccgaaagttgcaacgagaacagcaacgcgcaaaagaacttgaaaaccgacagaagaaactggagcacgccaaccggcatttgttgctcagaatacaggaacttgaaatgcaggctcgagctcatggactttcccttattccatccacgggtctctgctctccagatttggtgaatcggatcatcaagcaagaacccgttcttgagaactgcagccaagacctccttcagcatcatgcagacctaacctgtacaacaactctcgatctcacggatggcaccatcaccttcaacaacaacctcggaactgggactgaggccaaccaagcctatagtgtccccacaaaaatgggatccaaactggaagacatcctgatggacgacaccctttctcccgtcggtgtcactgatccactcctttcctcagtgtcccccggagcttccaaaacaagcagccggaggagcagtatgagcatggaagagacggagcacacttgttagcgaatcctccctgcactgcattcgcacaaactgcttcctttcttgattcgtagatttaataacttacctgaaggggttttcttgataattttcctttaatatgaaattttttttcatgctttatcaatagcccaggatatattttatttttagaattttgtgaaacagacttgtatattctattttacaactacaaatgcctccaaagtattgtacaaataagtgtgcagtatctgtgaactgaattcaccacagactttagctttctgagcaagaggattttgcgtcagagaaatgtctgtccatttttattcaggggaaacttgatttgagatttttatgcctgtgacttccttggaaatcaaatgtaaagtttaattgaaagaatgtaaagcaaccaaaaagaaaaaaaaaaagaaagaaagaggaaaagaaatccatactaacccttttccattttataaatgtattgattcattggtactgccttaaagatacagtacccctctagctttgtttagtctttatactgcaaactatttaaagaaatatgtattctgtaaaagaaaaaaaaaatgcggccttttcatgaggatcgtctggttagaaaacataactgataccaaccgaaactgaagggagttagaccaaggctctgaaatataaagtctaatcttgctctcttttattctgtgctgttacagttttcttcatcaatgagtgtgatccagtttttcataagatattttattttgaaatggaaattaatgtcctctcaaagtaaaatattgaggagcactgaaagtatgttttactttttttttattttatttttgcttttgataagaaaaccgaactgggcatatttctaattggctttactatttttatttttaaattatgttttactgttcatttgatttgtacagattctttattatcattgttcttttcaatatatttgtattaatttgtaagaatatgcatcttaaaatggcaagttttccatatttttacaactcactggtggttttccgcattctttgtacacccatgaaagaaaacttttatgcaaggtcttgcatttaaaagacagctttgcgaatattttgtaaattacagtctcactcagaactgtttttggacacatttaaggtgtagtattaataggttaaaaccaggctttctagaaagaataaacttacatatttatttttaggacatgaaaatagcaatattcttggagattgataaccatagcattaatacgcccattatggtcatttaaattggggtttatttcagcaaacttgttgaatttatttttaagaaagaaatactgtattgggaagttactgttacttgataacaatgttttaacaagaagcaatgttataaagttagtttcagtgcattatctacttgtgtagtcctatgcaataacagtagtgttacatgtatcaagcctagatgttttatacagatgccatatagtgttatgagccaggctgttgaatggaatttctcagtagcagcctacaactgaatagcaagtggcataaagcatatccattcagaatgaagtgccttaaatatagcagtagtcttttttggactagcactgactgaactgtaatgtaggggaaagtttcatgatggtatctatagtcaagacgaacatgtagcatggtgcctatgtagacaatataagagcttccaattttccttcagatatttttaatattaaatatattttagtgacagagtgccaacttctttcatcaggaaaccttattcaggagggtttttaaaaagtgtttaaatgtcaaatgtgaattggtgatgggtgatggagggttcagagaggagtgatcgtcagatgtgtgaatggacggtttaggtgaaaataatcaactgcatagttcccatgcacgctgggcaatgagaatccttggaaacattggtgatgctatcagttttatagctttatttcttaagggggtagggaaaattagttcccattctttcaacccccttaactgtatagctcttttcctagaatagtgacgcaaatctgcatgaacagctaattgtaccatagtgttcattgatacaatcatagcattgtctatttttctcttcatatttatatgggggggagggcgctggatgcaaaagttgaagatcgtgatgctatgatgttagttttccttagctgattttgagggtttttaaaaataaagcaaggttgactaacctacggccacgggaacaggaccatggttaagcaaccatatagaaagctttgttgaaagaaagtatggcatcttgtaccactgccctgactgtcacaactcctaaccttgccattgcctgcctccccctccccttctccttaagagacaatttctgcaggtggcaggtgagcaagcccaggagaatgctgcaatcttgggggtggttttatttatttcttttttgccaaatagagtgtggattcatttcaggggctagctaagccaagaggcagtggtttgggcttgttgtttgtaacaagaaaatgatccacaccactcccccgattcccgggtgcagaattgtaactcggggttgggcctctatatggagtgaccaaaatgccaaaattgtccatctgcctctgagtagggcaatggaaataccaaaccttctgactttgccaaaaagcatacaagcaacctggtcatacataggatgacaaaattctttctggttgtttttaaacaataaagcaataagaacaaatacaatacataggaagttaaaagcacaaaggaatgaacttattaatatttttgaaaaatgcactgggaaaaagttgatgtcaataacagtataaaacagccctatttcttgataaaaaatgacaaatgactgtctcttgcggatgcttggtactgtaatgttaataatagtcacctgctgttggatgcagcaataatttctgtatggtccatagcactgtatattatggatcgatattaatgtatccaatgaaataatcgacttgttcttgatagcctcattaaagcatttggtttttcacataaaaaaaaaaaaaaaaaaaaaa

SEQ ID NO: 385 - DNA, 4597 bp, Homo sapiens
atgttgtatgcattttggttttcccacagcagttccgccgagcatcctggggcctccaagcctccgataagctcctccagtatgacatcacgcatcttgctacgccagcaactcatgcgtgagcagatgcaggagcaggagcgcagggagcagcagcagaagctgcaggcggcccagttcatgcaacagagagtgcccgtgagtcagacaccagccataaacgtcagtgtgcccaccacccttccctctgccacgcaggtgccgatggaagtccttaaggtgcagacccacctcgaaaaccccaccaagtaccacatacagcaagcccaacggcagcaggtaaagcagtacctttctaccactttagcaaataaacatgccaaccaagtcctgagcttgccatgtccaaaccagcctggcgatcatgtcatgccaccggtgccggggagcagcgcacccaacagccccatggctatgcttacgcttaactccaactgtgaaaaagagggattttataagtttgaagagcaaaacagggcagagagcgagtgcccaggcatgaacacacattcacgagcgtcctgtatgcagatggatgatgtaatcgatgacatcattagcctagaatcaagttataatgaggaaatcttgggcttgatggatcctgctttgcaaatggcaaatacgttgcctgtctcgggaaacttgattgatctttatggaaaccaaggtctgcccccaccaggcctcaccatcagcaactcctgtccagccaaccttcccaacataaaaagggagctcacagagtctgaagcaagagcactggccaaagagaggcagaaaaaggacaatcacaacctgattgaacgaagaagaagatttaacataaatgaccgcattaaagaactaggtactttgattcccaagtcaaatgatccagacatgcgctggaacaagggaaccatcttaaaagcatccgtggactatatccgaaagttgcaacgagaacagcaacgcgcaaaagaacttgaaaaccgacagaagaaactggagcacgccaaccggcatttgttgctcagaatacaggaacttgaaatgcaggctcgagctcatggactttcccttattccatccacgggtctctgctctccagatttggtgaatcggatcatcaagcaagaacccgttcttgagaactgcagccaagacctccttcagcatcatgcagacctaacctgtacaacaactctcgatctcacggatggcaccatcaccttcaacaacaacctcggaactgggactgaggccaaccaagcctatagtgtccccacaaaaatgggatccaaactggaagacatcctgatggacgacaccctttctcccgtcggtgtcactgatccactcctttcctcagtgtcccccggagcttccaaaacaagcagccggaggagcagtatgagcatggaagagacggagcacacttgttagcgaatcctccctgcactgcattcgcacaaactgcttcctttcttgattcgtagatttaataacttacctgaaggggttttcttgataattttcctttaatatgaaattttttttcatgctttatcaatagcccaggatatattttatttttagaattttgtgaaacagacttgtatattctattttacaactacaaatgcctccaaagtattgtacaaataagtgtgcagtatctgtgaactgaattcaccacagactttagctttctgagcaagaggattttgcgtcagagaaatgtctgtccatttttattcaggggaaacttgatttgagatttttatgcctgtgacttccttggaaatcaaatgtaaagtttaattgaaagaatgtaaagcaaccaaaaagaaaaaaaaaaagaaagaaagaggaaaagaaatccatactaacccttttccattttataaatgtattgattcattggtactgccttaaagatacagtacccctctagctttgtttagtctttatactgcaaactatttaaagaaatatgtattctgtaaaagaaaaaaaaaatgcggccttttcatgaggatcgtctggttagaaaacataactgataccaaccgaaactgaagggagttagaccaaggctctgaaatataaagtctaatcttgctctcttttattctgtgctgttacagttttcttcatcaatgagtgtgatccagtttttcataagatattttattttgaaatggaaattaatgtcctctcaaagtaaaatattgaggagcactgaaagtatgttttactttttttttattttatttttgcttttgataagaaaaccgaactgggcatatttctaattggctttactatttttatttttaaattatgttttactgttcatttgatttgtacagattctttattatcattgttcttttcaatatatttgtattaatttgtaagaatatgcatcttaaaatggcaagttttccatatttttacaactcactggtggttttccgcattctttgtacacccatgaaagaaaacttttatgcaaggtcttgcatttaaaagacagctttgcgaatattttgtaaattacagtctcactcagaactgtttttggacacatttaaggtgtagtattaataggttaaaaccaggctttctagaaagaataaacttacatatttatttttaggacatgaaaatagcaatattcttggagattgataaccatagcattaatacgcccattatggtcatttaaattggggtttatttcagcaaacttgttgaatttatttttaagaaagaaatactgtattgggaagttactgttacttgataacaatgttttaacaagaagcaatgttataaagttagtttcagtgcattatctacttgtgtagtcctatgcaataacagtagtgttacatgtatcaagcctagatgttttatacagatgccatatagtgttatgagccaggctgttgaatggaatttctcagtagcagcctacaactgaatagcaagtggcataaagcatatccattcagaatgaagtgccttaaatatagcagtagtcttttttggactagcactgactgaactgtaatgtaggggaaagtttcatgatggtatctatagtcaagacgaacatgtagcatggtgcctatgtagacaatataagagcttccaattttccttcagatatttttaatattaaatatattttagtgacagagtgccaacttctttcatcaggaaaccttattcaggagggtttttaaaaagtgtttaaatgtcaaatgtgaattggtgatgggtgatggagggttcagagaggagtgatcgtcagatgtgtgaatggacggtttaggtgaaaataatcaactgcatagttcccatgcacgctgggcaatgagaatccttggaaacattggtgatgctatcagttttatagctttatttcttaagggggtagggaaaattagttcccattctttcaacccccttaactgtatagctcttttcctagaatagtgacgcaaatctgcatgaacagctaattgtaccatagtgttcattgatacaatcatagcattgtctatttttctcttcatatttatatgggggggagggcgctggatgcaaaagttgaagatcgtgatgctatgatgttagttttccttagctgattttgagggtttttaaaaataaagcaaggttgactaacctacggccacgggaacaggaccatggttaagcaaccatatagaaagctttgttgaaagaaagtatggcatcttgtaccactgccctgactgtcacaactcctaaccttgccattgcctgcctccccctccccttctccttaagagacaatttctgcaggtggcaggtgagcaagcccaggagaatgctgcaatcttgggggtggttttatttatttcttttttgccaaatagagtgtggattcatttcaggggctagctaagccaagaggcagtggtttgggcttgttgtttgtaacaagaaaatgatccacaccactcccccgattcccgggtgcagaattgtaactcggggttgggcctctatatggagtgaccaaaatgccaaaattgtccatctgcctctgagtagggcaatggaaataccaaaccttctgactttgccaaaaagcatacaagcaacctggtcatacataggatgacaaaattctttctggttgtttttaaacaataaagcaataagaacaaatacaatacataggaagttaaaagcacaaaggaatgaacttattaatatttttgaaaaatgcactgggaaaaagttgatgtcaataacagtataaaacagccctatttcttgataaaaaatgacaaatgactgtctcttgcggatgcttggtactgtaatgttaataatagtcacctgctgttggatgcagcaataatttctgtatggtccatagcactgtatattatggatcgatattaatgtatccaatgaaataatcgacttgttcttgatagcctcattaaagcatttggtttttcacataaaaaaaaaaaaaaaaaaaaaa

SEQ ID NO: 386 - DNA, 4624 bp, Homo sapiens
atggaggcgcttagagttcagatgttcatgccatgctcctttgaaagcttgtatctcagttccgccgagcatcctggggcctccaagcctccgataagctcctccagtatgacatcacgcatcttgctacgccagcaactcatgcgtgagcagatgcaggagcaggagcgcagggagcagcagcagaagctgcaggcggcccagttcatgcaacagagagtgcccgtgagtcagacaccagccataaacgtcagtgtgcccaccacccttccctctgccacgcaggtgccgatggaagtccttaaggtgcagacccacctcgaaaaccccaccaagtaccacatacagcaagcccaacggcagcaggtaaagcagtacctttctaccactttagcaaataaacatgccaaccaagtcctgagcttgccatgtccaaaccagcctggcgatcatgtcatgccaccggtgccggggagcagcgcacccaacagccccatggctatgcttacgcttaactccaactgtgaaaaagagggattttataagtttgaagagcaaaacagggcagagagcgagtgcccaggcatgaacacacattcacgagcgtcctgtatgcagatggatgatgtaatcgatgacatcattagcctagaatcaagttataatgaggaaatcttgggcttgatggatcctgctttgcaaatggcaaatacgttgcctgtctcgggaaacttgattgatctttatggaaaccaaggtctgcccccaccaggcctcaccatcagcaactcctgtccagccaaccttcccaacataaaaagggagctcacagagtctgaagcaagagcactggccaaagagaggcagaaaaaggacaatcacaacctgattgaacgaagaagaagatttaacataaatgaccgcattaaagaactaggtactttgattcccaagtcaaatgatccagacatgcgctggaacaagggaaccatcttaaaagcatccgtggactatatccgaaagttgcaacgagaacagcaacgcgcaaaagaacttgaaaaccgacagaagaaactggagcacgccaaccggcatttgttgctcagaatacaggaacttgaaatgcaggctcgagctcatggactttcccttattccatccacgggtctctgctctccagatttggtgaatcggatcatcaagcaagaacccgttcttgagaactgcagccaagacctccttcagcatcatgcagacctaacctgtacaacaactctcgatctcacggatggcaccatcaccttcaacaacaacctcggaactgggactgaggccaaccaagcctatagtgtccccacaaaaatgggatccaaactggaagacatcctgatggacgacaccctttctcccgtcggtgtcactgatccactcctttcctcagtgtcccccggagcttccaaaacaagcagccggaggagcagtatgagcatggaagagacggagcacacttgttagcgaatcctccctgcactgcattcgcacaaactgcttcctttcttgattcgtagatttaataacttacctgaaggggttttcttgataattttcctttaatatgaaattttttttcatgctttatcaatagcccaggatatattttatttttagaattttgtgaaacagacttgtatattctattttacaactacaaatgcctccaaagtattgtacaaataagtgtgcagtatctgtgaactgaattcaccacagactttagctttctgagcaagaggattttgcgtcagagaaatgtctgtccatttttattcaggggaaacttgatttgagatttttatgcctgtgacttccttggaaatcaaatgtaaagtttaattgaaagaatgtaaagcaaccaaaaagaaaaaaaaaaagaaagaaagaggaaaagaaatccatactaacccttttccattttataaatgtattgattcattggtactgccttaaagatacagtacccctctagctttgtttagtctttatactgcaaactatttaaagaaatatgtattctgtaaaagaaaaaaaaaatgcggccttttcatgaggatcgtctggttagaaaacataactgataccaaccgaaactgaagggagttagaccaaggctctgaaatataaagtctaatcttgctctcttttattctgtgctgttacagttttcttcatcaatgagtgtgatccagtttttcataagatattttattttgaaatggaaattaatgtcctctcaaagtaaaatattgaggagcactgaaagtatgttttactttttttttattttatttttgcttttgataagaaaaccgaactgggcatatttctaattggctttactatttttatttttaaattatgttttactgttcatttgatttgtacagattctttattatcattgttcttttcaatatatttgtattaatttgtaagaatatgcatcttaaaatggcaagttttccatatttttacaactcactggtggttttccgcattctttgtacacccatgaaagaaaacttttatgcaaggtcttgcatttaaaagacagctttgcgaatattttgtaaattacagtctcactcagaactgtttttggacacatttaaggtgtagtattaataggttaaaaccaggctttctagaaagaataaacttacatatttatttttaggacatgaaaatagcaatattcttggagattgataaccatagcattaatacgcccattatggtcatttaaattggggtttatttcagcaaacttgttgaatttatttttaagaaagaaatactgtattgggaagttactgttacttgataacaatgttttaacaagaagcaatgttataaagttagtttcagtgcattatctacttgtgtagtcctatgcaataacagtagtgttacatgtatcaagcctagatgttttatacagatgccatatagtgttatgagccaggctgttgaatggaatttctcagtagcagcctacaactgaatagcaagtggcataaagcatatccattcagaatgaagtgccttaaatatagcagtagtcttttttggactagcactgactgaactgtaatgtaggggaaagtttcatgatggtatctatagtcaagacgaacatgtagcatggtgcctatgtagacaatataagagcttccaattttccttcagatatttttaatattaaatatattttagtgacagagtgccaacttctttcatcaggaaaccttattcaggagggtttttaaaaagtgtttaaatgtcaaatgtgaattggtgatgggtgatggagggttcagagaggagtgatcgtcagatgtgtgaatggacggtttaggtgaaaataatcaactgcatagttcccatgcacgctgggcaatgagaatccttggaaacattggtgatgctatcagttttatagctttatttcttaagggggtagggaaaattagttcccattctttcaacccccttaactgtatagctcttttcctagaatagtgacgcaaatctgcatgaacagctaattgtaccatagtgttcattgatacaatcatagcattgtctatttttctcttcatatttatatgggggggagggcgctggatgcaaaagttgaagatcgtgatgctatgatgttagttttccttagctgattttgagggtttttaaaaataaagcaaggttgactaacctacggccacgggaacaggaccatggttaagcaaccatatagaaagctttgttgaaagaaagtatggcatcttgtaccactgccctgactgtcacaactcctaaccttgccattgcctgcctccccctccccttctccttaagagacaatttctgcaggtggcaggtgagcaagcccaggagaatgctgcaatcttgggggtggttttatttatttcttttttgccaaatagagtgtggattcatttcaggggctagctaagccaagaggcagtggtttgggcttgttgtttgtaacaagaaaatgatccacaccactcccccgattcccgggtgcagaattgtaactcggggttgggcctctatatggagtgaccaaaatgccaaaattgtccatctgcctctgagtagggcaatggaaataccaaaccttctgactttgccaaaaagcatacaagcaacctggtcatacataggatgacaaaattctttctggttgtttttaaacaataaagcaataagaacaaatacaatacataggaagttaaaagcacaaaggaatgaacttattaatatttttgaaaaatgcactgggaaaaagttgatgtcaataacagtataaaacagccctatttcttgataaaaaatgacaaatgactgtctcttgcggatgcttggtactgtaatgttaataatagtcacctgctgttggatgcagcaataatttctgtatggtccatagcactgtatattatggatcgatattaatgtatccaatgaaataatcgacttgttcttgatagcctcattaaagcatttggtttttcacataaaaaaaaaaaaaaaaaaaaaa

SEQ ID NO: 387 - DNA, 4472 bp, Homo sapiens
cgggataccttgtttatagtaccttctctttgccagtccatcttcaaattggaattatagaaagtagagggagggatagtctaccgtctctcactggattggtgccacctaaaacattgttatgctggaaatgctagaatataatcactatcaggtgcagacccacctcgaaaaccccaccaagtaccacatacagcaagcccaacggcagcaggtaaagcagtacctttctaccactttagcaaataaacatgccaaccaagtcctgagcttgccatgtccaaaccagcctggcgatcatgtcatgccaccggtgccggggagcagcgcacccaacagccccatggctatgcttacgcttaactccaactgtgaaaaagagggattttataagtttgaagagcaaaacagggcagagagcgagtgcccaggcatgaacacacattcacgagcgtcctgtatgcagatggatgatgtaatcgatgacatcattagcctagaatcaagttataatgaggaaatcttgggcttgatggatcctgctttgcaaatggcaaatacgttgcctgtctcgggaaacttgattgatctttatggaaaccaaggtctgcccccaccaggcctcaccatcagcaactcctgtccagccaaccttcccaacataaaaagggagctcacagagtctgaagcaagagcactggccaaagagaggcagaaaaaggacaatcacaacctgattgaacgaagaagaagatttaacataaatgaccgcattaaagaactaggtactttgattcccaagtcaaatgatccagacatgcgctggaacaagggaaccatcttaaaagcatccgtggactatatccgaaagttgcaacgagaacagcaacgcgcaaaagaacttgaaaaccgacagaagaaactggagcacgccaaccggcatttgttgctcagaatacaggaacttgaaatgcaggctcgagctcatggactttcccttattccatccacgggtctctgctctccagatttggtgaatcggatcatcaagcaagaacccgttcttgagaactgcagccaagacctccttcagcatcatgcagacctaacctgtacaacaactctcgatctcacggatggcaccatcaccttcaacaacaacctcggaactgggactgaggccaaccaagcctatagtgtccccacaaaaatgggatccaaactggaagacatcctgatggacgacaccctttctcccgtcggtgtcactgatccactcctttcctcagtgtcccccggagcttccaaaacaagcagccggaggagcagtatgagcatggaagagacggagcacacttgttagcgaatcctccctgcactgcattcgcacaaactgcttcctttcttgattcgtagatttaataacttacctgaaggggttttcttgataattttcctttaatatgaaattttttttcatgctttatcaatagcccaggatatattttatttttagaattttgtgaaacagacttgtatattctattttacaactacaaatgcctccaaagtattgtacaaataagtgtgcagtatctgtgaactgaattcaccacagactttagctttctgagcaagaggattttgcgtcagagaaatgtctgtccatttttattcaggggaaacttgatttgagatttttatgcctgtgacttccttggaaatcaaatgtaaagtttaattgaaagaatgtaaagcaaccaaaaagaaaaaaaaaaagaaagaaagaggaaaagaaatccatactaacccttttccattttataaatgtattgattcattggtactgccttaaagatacagtacccctctagctttgtttagtctttatactgcaaactatttaaagaaatatgtattctgtaaaagaaaaaaaaaatgcggccttttcatgaggatcgtctggttagaaaacataactgataccaaccgaaactgaagggagttagaccaaggctctgaaatataaagtctaatcttgctctcttttattctgtgctgttacagttttcttcatcaatgagtgtgatccagtttttcataagatattttattttgaaatggaaattaatgtcctctcaaagtaaaatattgaggagcactgaaagtatgttttactttttttttattttatttttgcttttgataagaaaaccgaactgggcatatttctaattggctttactatttttatttttaaattatgttttactgttcatttgatttgtacagattctttattatcattgttcttttcaatatatttgtattaatttgtaagaatatgcatcttaaaatggcaagttttccatatttttacaactcactggtggttttccgcattctttgtacacccatgaaagaaaacttttatgcaaggtcttgcatttaaaagacagctttgcgaatattttgtaaattacagtctcactcagaactgtttttggacacatttaaggtgtagtattaataggttaaaaccaggctttctagaaagaataaacttacatatttatttttaggacatgaaaatagcaatattcttggagattgataaccatagcattaatacgcccattatggtcatttaaattggggtttatttcagcaaacttgttgaatttatttttaagaaagaaatactgtattgggaagttactgttacttgataacaatgttttaacaagaagcaatgttataaagttagtttcagtgcattatctacttgtgtagtcctatgcaataacagtagtgttacatgtatcaagcctagatgttttatacagatgccatatagtgttatgagccaggctgttgaatggaatttctcagtagcagcctacaactgaatagcaagtggcataaagcatatccattcagaatgaagtgccttaaatatagcagtagtcttttttggactagcactgactgaactgtaatgtaggggaaagtttcatgatggtatctatagtcaagacgaacatgtagcatggtgcctatgtagacaatataagagcttccaattttccttcagatatttttaatattaaatatattttagtgacagagtgccaacttctttcatcaggaaaccttattcaggagggtttttaaaaagtgtttaaatgtcaaatgtgaattggtgatgggtgatggagggttcagagaggagtgatcgtcagatgtgtgaatggacggtttaggtgaaaataatcaactgcatagttcccatgcacgctgggcaatgagaatccttggaaacattggtgatgctatcagttttatagctttatttcttaagggggtagggaaaattagttcccattctttcaacccccttaactgtatagctcttttcctagaatagtgacgcaaatctgcatgaacagctaattgtaccatagtgttcattgatacaatcatagcattgtctatttttctcttcatatttatatgggggggagggcgctggatgcaaaagttgaagatcgtgatgctatgatgttagttttccttagctgattttgagggtttttaaaaataaagcaaggttgactaacctacggccacgggaacaggaccatggttaagcaaccatatagaaagctttgttgaaagaaagtatggcatcttgtaccactgccctgactgtcacaactcctaaccttgccattgcctgcctccccctccccttctccttaagagacaatttctgcaggtggcaggtgagcaagcccaggagaatgctgcaatcttgggggtggttttatttatttcttttttgccaaatagagtgtggattcatttcaggggctagctaagccaagaggcagtggtttgggcttgttgtttgtaacaagaaaatgatccacaccactcccccgattcccgggtgcagaattgtaactcggggttgggcctctatatggagtgaccaaaatgccaaaattgtccatctgcctctgagtagggcaatggaaataccaaaccttctgactttgccaaaaagcatacaagcaacctggtcatacataggatgacaaaattctttctggttgtttttaaacaataaagcaataagaacaaatacaatacataggaagttaaaagcacaaaggaatgaacttattaatatttttgaaaaatgcactgggaaaaagttgatgtcaataacagtataaaacagccctatttcttgataaaaaatgacaaatgactgtctcttgcggatgcttggtactgtaatgttaataatagtcacctgctgttggatgcagcaataatttctgtatggtccatagcactgtatattatggatcgatattaatgtatccaatgaaataatcgacttgttcttgatagcctcattaaagcatttggtttttcacataaaaaaaaaaaaaaaaaaaaaa

SEQ ID NO: 388 - DNA, 4788 bp, Homo sapiens
agagctcggcactgcgccggggcgcacggctcgggggacccaggcccagctaccttccctccgcccccgggctctgttctcactttccagcagtggaaggacgggaagcgggagccatgcagtccgaatcggggatcgtgccggatttcgaagtcggggaggagtttcatgaagagcccaaaacctattacgaactcaaaagtcaaccgctgaagagcagcagttccgccgagcatcctggggcctccaagcctccgataagctcctccagtatgacatcacgcatcttgctacgccagcaactcatgcgtgagcagatgcaggagcaggagcgcagggagcagcagcagaagctgcaggcggcccagttcatgcaacagagagtgcccgtgagtcagacaccagccataaacgtcagtgtgcccaccacccttccctctgccacgcaggtgccgatggaagtccttaaggtgcagacccacctcgaaaaccccaccaagtaccacatacagcaagcccaacggcagcaggtaaagcagtacctttctaccactttagcaaataaacatgccaaccaagtcctgagcttgccatgtccaaaccagcctggcgatcatgtcatgccaccggtgccggggagcagcgcacccaacagccccatggctatgcttacgcttaactccaactgtgaaaaagagggattttataagtttgaagagcaaaacagggcagagagcgagtgcccaggcatgaacacacattcacgagcgtcctgtatgcagatggatgatgtaatcgatgacatcattagcctagaatcaagttataatgaggaaatcttgggcttgatggatcctgctttgcaaatggcaaatacgttgcctgtctcgggaaacttgattgatctttatggaaaccaaggtctgcccccaccaggcctcaccatcagcaactcctgtccagccaaccttcccaacataaaaagggagctcacagagtctgaagcaagagcactggccaaagagaggcagaaaaaggacaatcacaacctgattgaacgaagaagaagatttaacataaatgaccgcattaaagaactaggtactttgattcccaagtcaaatgatccagacatgcgctggaacaagggaaccatcttaaaagcatccgtggactatatccgaaagttgcaacgagaacagcaacgcgcaaaagaacttgaaaaccgacagaagaaactggagcacgccaaccggcatttgttgctcagaatacaggaacttgaaatgcaggctcgagctcatggactttcccttattccatccacgggtctctgctctccagatttggtgaatcggatcatcaagcaagaacccgttcttgagaactgcagccaagacctccttcagcatcatgcagacctaacctgtacaacaactctcgatctcacggatggcaccatcaccttcaacaacaacctcggaactgggactgaggccaaccaagcctatagtgtccccacaaaaatgggatccaaactggaagacatcctgatggacgacaccctttctcccgtcggtgtcactgatccactcctttcctcagtgtcccccggagcttccaaaacaagcagccggaggagcagtatgagcatggaagagacggagcacacttgttagcgaatcctccctgcactgcattcgcacaaactgcttcctttcttgattcgtagatttaataacttacctgaaggggttttcttgataattttcctttaatatgaaattttttttcatgctttatcaatagcccaggatatattttatttttagaattttgtgaaacagacttgtatattctattttacaactacaaatgcctccaaagtattgtacaaataagtgtgcagtatctgtgaactgaattcaccacagactttagctttctgagcaagaggattttgcgtcagagaaatgtctgtccatttttattcaggggaaacttgatttgagatttttatgcctgtgacttccttggaaatcaaatgtaaagtttaattgaaagaatgtaaagcaaccaaaaagaaaaaaaaaaagaaagaaagaggaaaagaaatccatactaacccttttccattttataaatgtattgattcattggtactgccttaaagatacagtacccctctagctttgtttagtctttatactgcaaactatttaaagaaatatgtattctgtaaaagaaaaaaaaaatgcggccttttcatgaggatcgtctggttagaaaacataactgataccaaccgaaactgaagggagttagaccaaggctctgaaatataaagtctaatcttgctctcttttattctgtgctgttacagttttcttcatcaatgagtgtgatccagtttttcataagatattttattttgaaatggaaattaatgtcctctcaaagtaaaatattgaggagcactgaaagtatgttttactttttttttattttatttttgcttttgataagaaaaccgaactgggcatatttctaattggctttactatttttatttttaaattatgttttactgttcatttgatttgtacagattctttattatcattgttcttttcaatatatttgtattaatttgtaagaatatgcatcttaaaatggcaagttttccatatttttacaactcactggtggttttccgcattctttgtacacccatgaaagaaaacttttatgcaaggtcttgcatttaaaagacagctttgcgaatattttgtaaattacagtctcactcagaactgtttttggacacatttaaggtgtagtattaataggttaaaaccaggctttctagaaagaataaacttacatatttatttttaggacatgaaaatagcaatattcttggagattgataaccatagcattaatacgcccattatggtcatttaaattggggtttatttcagcaaacttgttgaatttatttttaagaaagaaatactgtattgggaagttactgttacttgataacaatgttttaacaagaagcaatgttataaagttagtttcagtgcattatctacttgtgtagtcctatgcaataacagtagtgttacatgtatcaagcctagatgttttatacagatgccatatagtgttatgagccaggctgttgaatggaatttctcagtagcagcctacaactgaatagcaagtggcataaagcatatccattcagaatgaagtgccttaaatatagcagtagtcttttttggactagcactgactgaactgtaatgtaggggaaagtttcatgatggtatctatagtcaagacgaacatgtagcatggtgcctatgtagacaatataagagcttccaattttccttcagatatttttaatattaaatatattttagtgacagagtgccaacttctttcatcaggaaaccttattcaggagggtttttaaaaagtgtttaaatgtcaaatgtgaattggtgatgggtgatggagggttcagagaggagtgatcgtcagatgtgtgaatggacggtttaggtgaaaataatcaactgcatagttcccatgcacgctgggcaatgagaatccttggaaacattggtgatgctatcagttttatagctttatttcttaagggggtagggaaaattagttcccattctttcaacccccttaactgtatagctcttttcctagaatagtgacgcaaatctgcatgaacagctaattgtaccatagtgttcattgatacaatcatagcattgtctatttttctcttcatatttatatgggggggagggcgctggatgcaaaagttgaagatcgtgatgctatgatgttagttttccttagctgattttgagggtttttaaaaataaagcaaggttgactaacctacggccacgggaacaggaccatggttaagcaaccatatagaaagctttgttgaaagaaagtatggcatcttgtaccactgccctgactgtcacaactcctaaccttgccattgcctgcctccccctccccttctccttaagagacaatttctgcaggtggcaggtgagcaagcccaggagaatgctgcaatcttgggggtggttttatttatttcttttttgccaaatagagtgtggattcatttcaggggctagctaagccaagaggcagtggtttgggcttgttgtttgtaacaagaaaatgatccacaccactcccccgattcccgggtgcagaattgtaactcggggttgggcctctatatggagtgaccaaaatgccaaaattgtccatctgcctctgagtagggcaatggaaataccaaaccttctgactttgccaaaaagcatacaagcaacctggtcatacataggatgacaaaattctttctggttgtttttaaacaataaagcaataagaacaaatacaatacataggaagttaaaagcacaaaggaatgaacttattaatatttttgaaaaatgcactgggaaaaagttgatgtcaataacagtataaaacagccctatttcttgataaaaaatgacaaatgactgtctcttgcggatgcttggtactgtaatgttaataatagtcacctgctgttggatgcagcaataatttctgtatggtccatagcactgtatattatggatcgatattaatgtatccaatgaaataatcgacttgttcttgatagcctcattaaagcatttggtttttcacataaaaaaaaaaaaaaaaaaaaaa

SEQ ID NO: 389 - DNA, 4490 bp, Homo sapiens
cgggataccttgtttatagtaccttctctttgccagtccatcttcaaattggaattatagaaagtagagggagggatagtctaccgtctctcactggattggtgccacctaaaacattgttatgctggaaatgctagaatataatcactatcaggtgcagacccacctcgaaaaccccaccaagtaccacatacagcaagcccaacggcagcaggtaaagcagtacctttctaccactttagcaaataaacatgccaaccaagtcctgagcttgccatgtccaaaccagcctggcgatcatgtcatgccaccggtgccggggagcagcgcacccaacagccccatggctatgcttacgcttaactccaactgtgaaaaagagggattttataagtttgaagagcaaaacagggcagagagcgagtgcccaggcatgaacacacattcacgagcgtcctgtatgcagatggatgatgtaatcgatgacatcattagcctagaatcaagttataatgaggaaatcttgggcttgatggatcctgctttgcaaatggcaaatacgttgcctgtctcgggaaacttgattgatctttatggaaaccaaggtctgcccccaccaggcctcaccatcagcaactcctgtccagccaaccttcccaacataaaaagggagctcacagcgtgtatttttcccacagagtctgaagcaagagcactggccaaagagaggcagaaaaaggacaatcacaacctgattgaacgaagaagaagatttaacataaatgaccgcattaaagaactaggtactttgattcccaagtcaaatgatccagacatgcgctggaacaagggaaccatcttaaaagcatccgtggactatatccgaaagttgcaacgagaacagcaacgcgcaaaagaacttgaaaaccgacagaagaaactggagcacgccaaccggcatttgttgctcagaatacaggaacttgaaatgcaggctcgagctcatggactttcccttattccatccacgggtctctgctctccagatttggtgaatcggatcatcaagcaagaacccgttcttgagaactgcagccaagacctccttcagcatcatgcagacctaacctgtacaacaactctcgatctcacggatggcaccatcaccttcaacaacaacctcggaactgggactgaggccaaccaagcctatagtgtccccacaaaaatgggatccaaactggaagacatcctgatggacgacaccctttctcccgtcggtgtcactgatccactcctttcctcagtgtcccccggagcttccaaaacaagcagccggaggagcagtatgagcatggaagagacggagcacacttgttagcgaatcctccctgcactgcattcgcacaaactgcttcctttcttgattcgtagatttaataacttacctgaaggggttttcttgataattttcctttaatatgaaattttttttcatgctttatcaatagcccaggatatattttatttttagaattttgtgaaacagacttgtatattctattttacaactacaaatgcctccaaagtattgtacaaataagtgtgcagtatctgtgaactgaattcaccacagactttagctttctgagcaagaggattttgcgtcagagaaatgtctgtccatttttattcaggggaaacttgatttgagatttttatgcctgtgacttccttggaaatcaaatgtaaagtttaattgaaagaatgtaaagcaaccaaaaagaaaaaaaaaaagaaagaaagaggaaaagaaatccatactaacccttttccattttataaatgtattgattcattggtactgccttaaagatacagtacccctctagctttgtttagtctttatactgcaaactatttaaagaaatatgtattctgtaaaagaaaaaaaaaatgcggccttttcatgaggatcgtctggttagaaaacataactgataccaaccgaaactgaagggagttagaccaaggctctgaaatataaagtctaatcttgctctcttttattctgtgctgttacagttttcttcatcaatgagtgtgatccagtttttcataagatattttattttgaaatggaaattaatgtcctctcaaagtaaaatattgaggagcactgaaagtatgttttactttttttttattttatttttgcttttgataagaaaaccgaactgggcatatttctaattggctttactatttttatttttaaattatgttttactgttcatttgatttgtacagattctttattatcattgttcttttcaatatatttgtattaatttgtaagaatatgcatcttaaaatggcaagttttccatatttttacaactcactggtggttttccgcattctttgtacacccatgaaagaaaacttttatgcaaggtcttgcatttaaaagacagctttgcgaatattttgtaaattacagtctcactcagaactgtttttggacacatttaaggtgtagtattaataggttaaaaccaggctttctagaaagaataaacttacatatttatttttaggacatgaaaatagcaatattcttggagattgataaccatagcattaatacgcccattatggtcatttaaattggggtttatttcagcaaacttgttgaatttatttttaagaaagaaatactgtattgggaagttactgttacttgataacaatgttttaacaagaagcaatgttataaagttagtttcagtgcattatctacttgtgtagtcctatgcaataacagtagtgttacatgtatcaagcctagatgttttatacagatgccatatagtgttatgagccaggctgttgaatggaatttctcagtagcagcctacaactgaatagcaagtggcataaagcatatccattcagaatgaagtgccttaaatatagcagtagtcttttttggactagcactgactgaactgtaatgtaggggaaagtttcatgatggtatctatagtcaagacgaacatgtagcatggtgcctatgtagacaatataagagcttccaattttccttcagatatttttaatattaaatatattttagtgacagagtgccaacttctttcatcaggaaaccttattcaggagggtttttaaaaagtgtttaaatgtcaaatgtgaattggtgatgggtgatggagggttcagagaggagtgatcgtcagatgtgtgaatggacggtttaggtgaaaataatcaactgcatagttcccatgcacgctgggcaatgagaatccttggaaacattggtgatgctatcagttttatagctttatttcttaagggggtagggaaaattagttcccattctttcaacccccttaactgtatagctcttttcctagaatagtgacgcaaatctgcatgaacagctaattgtaccatagtgttcattgatacaatcatagcattgtctatttttctcttcatatttatatgggggggagggcgctggatgcaaaagttgaagatcgtgatgctatgatgttagttttccttagctgattttgagggtttttaaaaataaagcaaggttgactaacctacggccacgggaacaggaccatggttaagcaaccatatagaaagctttgttgaaagaaagtatggcatcttgtaccactgccctgactgtcacaactcctaaccttgccattgcctgcctccccctccccttctccttaagagacaatttctgcaggtggcaggtgagcaagcccaggagaatgctgcaatcttgggggtggttttatttatttcttttttgccaaatagagtgtggattcatttcaggggctagctaagccaagaggcagtggtttgggcttgttgtttgtaacaagaaaatgatccacaccactcccccgattcccgggtgcagaattgtaactcggggttgggcctctatatggagtgaccaaaatgccaaaattgtccatctgcctctgagtagggcaatggaaataccaaaccttctgactttgccaaaaagcatacaagcaacctggtcatacataggatgacaaaattctttctggttgtttttaaacaataaagcaataagaacaaatacaatacataggaagttaaaagcacaaaggaatgaacttattaatatttttgaaaaatgcactgggaaaaagttgatgtcaataacagtataaaacagccctatttcttgataaaaaatgacaaatgactgtctcttgcggatgcttggtactgtaatgttaataatagtcacctgctgttggatgcagcaataatttctgtatggtccatagcactgtatattatggatcgatattaatgtatccaatgaaataatcgacttgttcttgatagcctcattaaagcatttggtttttcacataaaaaaaaaaaaaaaaaaaaaa

SEQ ID NO: 390 - DNA, 1973 bp, Homo sapiens
gggatattggagtagcaagaggctgggaagccatcacttaccttgcactgagaaagaagacaaaggccagtatgcacagctttcctccactgctgctgctgctgttctggggtgtggtgtctcacagcttcccagcgactctagaaacacaagagcaagatgtggacttagtccagaaatacctggaaaaatactacaacctgaagaatgatgggaggcaagttgaaaagcggagaaatagtggcccagtggttgaaaaattgaagcaaatgcaggaattctttgggctgaaagtgactgggaaaccagatgctgaaaccctgaaggtgatgaagcagcccagatgtggagtgcctgatgtggctcagtttgtcctcactgaggggaaccctcgctgggagcaaacacatctgacctacaggattgaaaattacacgccagatttgccaagagcagatgtggaccatgccattgagaaagccttccaactctggagtaatgtcacacctctgacattcaccaaggtctctgagggtcaagcagacatcatgatatcttttgtcaggggagatcatcgggacaactctccttttgatggacctggaggaaatcttgctcatgcttttcaaccaggcccaggtattggaggggatgctcattttgatgaagatgaaaggtggaccaacaatttcagagagtacaacttacatcgtgttgcggctcatgaactcggccattctcttggactctcccattctactgatatcggggctttgatgtaccctagctacaccttcagtggtgatgttcagctagctcaggatgacattgatggcatccaagccatatatggacgttcccaaaatcctgtccagcccatcggcccacaaaccccaaaagcgtgtgacagtaagctaacctttgatgctataactacgattcggggagaagtgatgttctttaaagacagattctacatgcgcacaaatcccttctacccggaagttgagctcaatttcatttctgttttctggccacaactgccaaatgggcttgaagctgcttacgaatttgccgacagagatgaagtccggtttttcaaagggaataagtactgggctgttcagggacagaatgtgctacacggataccccaaggacatctacagctcctttggcttccctagaactgtgaagcatatcgatgctgctctttctgaggaaaacactggaaaaacctacttctttgttgctaacaaatactggaggtatgatgaatataaacgatctatggatccaggttatcccaaaatgatagcacatgactttcctggaattggccacaaagttgatgcagttttcatgaaagatggatttttctatttctttcatggaacaagacaatacaaatttgatcctaaaacgaagagaattttgactctccagaaagctaatagctggttcaactgcaggaaaaattgaacattactaatttgaatggaaaacacatggtgtgagtccaaagaaggtgttttcctgaagaactgtctattttctcagtcatttttaacctctagagtcactgatacacagaatataatcttatttatacctcagtttgcatatttttttactatttagaatgtagccctttttgtactgatataatttagttccacaaatggtgggtacaaaaagtcaagtttgtggcttatggattcatataggccagagttgcaaagatcttttccagagtatgcaactctgacgttgatcccagagagcagcttcagtgacaaacatatcctttcaagacagaaagagacaggagacatgagtctttgccggaggaaaagcagctcaagaacacatgtgcagtcactggtgtcaccctggataggcaagggataactcttctaacacaaaataagtgttttatgtttggaataaagtcaaccttgtttctactgtttt

SEQ ID NO: 391 - DNA, 1743 bp, Homo sapiens
aaagaaggtaagggcagtgagaatgatgcatcttgcattccttgtgctgttgtgtctgccagtctgctctgcctatcctctgagtggggcagcaaaagaggaggactccaacaaggatcttgcccagcaatacctagaaaagtactacaacctcgaaaaggatgtgaaacagtttagaagaaaggacagtaatctcattgttaaaaaaatccaaggaatgcagaagttccttgggttggaggtgacagggaagctagacactgacactctggaggtgatgcgcaagcccaggtgtggagttcctgacgttggtcacttcagctcctttcctggcatgccgaagtggaggaaaacccaccttacatacaggattgtgaattatacaccagatttgccaagagatgctgttgattctgccattgagaaagctctgaaagtctgggaagaggtgactccactcacattctccaggctgtatgaaggagaggctgatataatgatctctttcgcagttaaagaacatggagacttttactcttttgatggcccaggacacagtttggctcatgcctacccacctggacctgggctttatggagatattcactttgatgatgatgaaaaatggacagaagatgcatcaggcaccaatttattcctcgttgctgctcatgaacttggccactccctggggctctttcactcagccaacactgaagctttgatgtacccactctacaactcattcacagagctcgcccagttccgcctttcgcaagatgatgtgaatggcattcagtctctctacggacctccccctgcctctactgaggaacccctggtgcccacaaaatctgttccttcgggatctgagatgccagccaagtgtgatcctgctttgtccttcgatgccatcagcactctgaggggagaatatctgttctttaaagacagatatttttggcgaagatcccactggaaccctgaacctgaatttcatttgatttctgcattttggccctctcttccatcatatttggatgctgcatatgaagttaacagcagggacaccgtttttatttttaaaggaaatgagttctgggccatcagaggaaatgaggtacaagcaggttatccaagaggcatccataccctgggttttcctccaaccataaggaaaattgatgcagctgtttctgacaaggaaaagaagaaaacatacttctttgcagcggacaaatactggagatttgatgaaaatagccagtccatggagcaaggcttccctagactaatagctgatgactttccaggagttgagcctaaggttgatgctgtattacaggcatttggatttttctacttcttcagtggatcatcacagtttgagtttgaccccaatgccaggatggtgacacacatattaaagagtaacagctggttacattgctaggcgagatagggggaagacagatatgggtgtttttaataaatctaataattattcatctaatgtattatgagccaaaatggttaatttttcctgcatgttctgtgactgaagaagatgagccttgcagatatctgcatgtgtcatgaagaatgtttctggaattcttcacttgcttttgaattgcactgaacagaattaagaaatactcatgtgcaataggtgagagaatgtattttcatagatgtgttattacttcctcaataaaaagttttattttgggcctgttcctt

SEQ ID NO: 392 - DNA, 1825 bp, Homo sapiens
agaaaggaacacagtaaactgaattgatccgtttagaagtttacaatgaagtttcttctaatactgctcctgcaggccactgcttctggagctcttcccctgaacagctctacaagcctggaaaaaaataatgtgctatttggtgaaagatacttagaaaaattttatggccttgagataaacaaacttccagtgacaaaaatgaaatatagtggaaacttaatgaaggaaaaaatccaagaaatgcagcacttcttgggtctgaaagtgaccgggcaactggacacatctaccctggagatgatgcacgcacctcgatgtggagtccccgatgtccatcatttcagggaaatgccaggggggcccgtatggaggaaacattatatcacctacagaatcaataattacacacctgacatgaaccgtgaggatgttgactacgcaatccggaaagctttccaagtatggagtaatgttacccccttgaaattcagcaagattaacacaggcatggctgacattttggtggtttttgcccgtggagctcatggagacttccatgcttttgatggcaaaggtggaatcctagcccatgcttttggacctggatctggcattggaggggatgcacatttcgatgaggacgaattctggactacacattcaggaggcaccaacttgttcctcactgctgttcacgagattggccattccttaggtcttggccattctagtgatccaaaggccgtaatgttccccacctacaaatatgttgacatcaacacatttcgcctctctgctgatgacatacgtggcattcagtccctgtatggagacccaaaagagaaccaacgcttgccaaatcctgacaattcagaaccagctctctgtgaccccaatttgagttttgatgctgtcactaccgtgggaaataagatctttttcttcaaagacaggttcttctggctgaaggtttctgagagaccaaagaccagtgttaatttaatttcttccttatggccaaccttgccatctggcattgaagctgcttatgaaattgaagccagaaatcaagtttttctttttaaagatgacaaatactggttaattagcaatttaagaccagagccaaattatcccaagagcatacattcttttggttttcctaactttgtgaaaaaaattgatgcagctgtttttaacccacgtttttataggacctacttctttgtagataaccagtattggaggtatgatgaaaggagacagatgatggaccctggttatcccaaactgattaccaagaacttccaaggaatcgggcctaaaattgatgcagtcttctactctaaaaacaaatactactatttcttccaaggatctaaccaatttgaatatgacttcctactccaacgtatcaccaaaacactgaaaagcaatagctggtttggttgttagaaatggtgtaattaatggtttttgttagttcacttcagcttaataagtatttattgcatatttgctatgtcctcagtgtaccactacttagagatatgtatcataaaaataaaatctgtaaaccataggtaatgattatataaaatacataatatttttcaattttgaaaactctaattgtccattcttgcttgactctactattaagtttgaaaatagttaccttcaaaggccaagagaattctatttgaagcatgctctgtaagttgcttcctaacatccttggactgagaaattatacttacttctggcataactaaaattaagtatatatattttggctcaaataaaattgaaaaaaaaatca

SEQ ID NO: 393 - DNA, 3546 bp, Homo sapiens
gcggctgccctcccttgtttccgctgcatccagacttcctcaggcggtggctggaggctgcgcatctggggctttaaacatacaaagggattgccaggacctgcggcggcggcggcggcggcgggggctggggcgcgggggccggaccatgagccgctgagccgggcaaaccccaggccaccgagccagcggaccctcggagcgcagccctgcgccgcggagcaggctccaaccaggcggcgaggcggccacacgcaccgagccagcgacccccgggcgacgcgcggggccagggagcgctacgatggaggcgctaatggcccggggcgcgctcacgggtcccctgagggcgctctgtctcctgggctgcctgctgagccacgccgccgccgcgccgtcgcccatcatcaagttccccggcgatgtcgcccccaaaacggacaaagagttggcagtgcaatacctgaacaccttctatggctgccccaaggagagctgcaacctgtttgtgctgaaggacacactaaagaagatgcagaagttctttggactgccccagacaggtgatcttgaccagaataccatcgagaccatgcggaagccacgctgcggcaacccagatgtggccaactacaacttcttccctcgcaagcccaagtgggacaagaaccagatcacatacaggatcattggctacacacctgatctggacccagagacagtggatgatgcctttgctcgtgccttccaagtctggagcgatgtgaccccactgcggttttctcgaatccatgatggagaggcagacatcatgatcaactttggccgctgggagcatggcgatggatacccctttgacggtaaggacggactcctggctcatgccttcgccccaggcactggtgttgggggagactcccattttgatgacgatgagctatggaccttgggagaaggccaagtggtccgtgtgaagtatgggaacgccgatggggagtactgcaagttccccttcttgttcaatggcaaggagtacaacagctgcactgataccggccgcagcgatggcttcctctggtgctccaccacctacaactttgagaaggatggcaagtacggcttctgtccccatgaagccctgttcaccatgggcggcaacgctgaaggacagccctgcaagtttccattccgcttccagggcacatcctatgacagctgcaccactgagggccgcacggatggctaccgctggtgcggcaccactgaggactacgaccgcgacaagaagtatggcttctgccctgagaccgccatgtccactgttggtgggaactcagaaggtgccccctgtgtcttccccttcactttcctgggcaacaaatatgagagctgcaccagcgccggccgcagtgacggaaagatgtggtgtgcgaccacagccaactacgatgatgaccgcaagtggggcttctgccctgaccaagggtacagcctgttcctcgtggcagcccacgagtttggccacgccatggggctggagcactcccaagaccctggggccctgatggcacccatttacacctacaccaagaacttccgtctgtcccaggatgacatcaagggcattcaggagctctatggggcctctcctgacattgaccttggcaccggccccacccccacgctgggccctgtcactcctgagatctgcaaacaggacattgtatttgatggcatcgctcagatccgtggtgagatcttcttcttcaaggaccggttcatttggcggactgtgacgccacgtgacaagcccatggggcccctgctggtggccacattctggcctgagctcccggaaaagattgatgcggtatacgaggccccacaggaggagaaggctgtgttctttgcagggaatgaatactggatctactcagccagcaccctggagcgagggtaccccaagccactgaccagcctgggactgccccctgatgtccagcgagtggatgccgcctttaactggagcaaaaacaagaagacatacatctttgctggagacaaattctggagatacaatgaggtgaagaagaaaatggatcctggcttccccaagctcatcgcagatgcctggaatgccatccccgataacctggatgccgtcgtggacctgcagggcggcggtcacagctacttcttcaagggtgcctattacctgaagctggagaaccaaagtctgaagagcgtgaagtttggaagcatcaaatccgactggctaggctgctgagctggccctggctcccacaggcccttcctctccactgccttcgatacaccgggcctggagaactagagaaggacccggaggggcctggcagccgtgccttcagctctacagctaatcagcattctcactcctacctggtaatttaagattccagagagtggctcctcccggtgcccaagaatagatgctgactgtactcctcccaggcgccccttccccctccaatcccaccaaccctcagagccacccctaaagagatactttgatattttcaacgcagccctgctttgggctgccctggtgctgccacacttcaggctcttctcctttcacaaccttctgtggctcacagaacccttggagccaatggagactgtctcaagagggcactggtggcccgacagcctggcacagggcagtgggacagggcatggccaggtggccactccagacccctggcttttcactgctggctgccttagaacctttcttacattagcagtttgctttgtatgcactttgtttttttctttgggtcttgttttttttttccacttagaaattgcatttcctgacagaaggactcaggttgtctgaagtcactgcacagtgcatctcagcccacatagtgatggttcccctgttcactctacttagcatgtccctaccgagtctcttctccactggatggaggaaaaccaagccgtggcttcccgctcagccctccctgcccctcccttcaaccattccccatgggaaatgtcaacaagtatgaataaagacacctactgagtggccgtgtttgccatctgttttagcagagcctagacaagggccacagacccagccagaagcggaaacttaaaaagtccgaatctctgctccctgcagggcacaggtgatggtgtctgctggaaaggtcagagcttccaaagtaaacagcaagagaacctcagggagagtaagctctagtccctctgtcctgtagaaagagccctgaagaatcagcaattttgttgctttattgtggcatctgttcgaggtttgcttcctctttaagtctgtttcttcattagcaatcatatcagttttaatgctactactaacaatgaacagtaacaataatatccccctcaattaatagagtgctttctatgtgcaaggcacttttcacgtgtcacctattttaacctttccaaccacataaataaaaaaggccattattagttgaatcttattgatgaagagaaaaaaaaaaa

SEQ ID NO: 394 - DNA, 1828 bp, Homo sapiens
ctacaaggaggcaggcaagacagcaaggcatagagacaacatagagctaagtaaagccagtggaaatgaagagtcttccaatcctactgttgctgtgcgtggcagtttgctcagcctatccattggatggagctgcaaggggtgaggacaccagcatgaaccttgttcagaaatatctagaaaactactacgacctcaaaaaagatgtgaaacagtttgttaggagaaaggacagtggtcctgttgttaaaaaaatccgagaaatgcagaagttccttggattggaggtgacggggaagctggactccgacactctggaggtgatgcgcaagcccaggtgtggagttcctgatgttggtcacttcagaacctttcctggcatcccgaagtggaggaaaacccaccttacatacaggattgtgaattatacaccagatttgccaaaagatgctgttgattctgctgttgagaaagctctgaaagtctgggaagaggtgactccactcacattctccaggctgtatgaaggagaggctgatataatgatctcttttgcagttagagaacatggagacttttacccttttgatggacctggaaatgttttggcccatgcctatgcccctgggccagggattaatggagatgcccactttgatgatgatgaacaatggacaaaggatacaacagggaccaatttatttctcgttgctgctcatgaaattggccactccctgggtctctttcactcagccaacactgaagctttgatgtacccactctatcactcactcacagacctgactcggttccgcctgtctcaagatgatataaatggcattcagtccctctatggacctccccctgactcccctgagacccccctggtacccacggaacctgtccctccagaacctgggacgccagccaactgtgatcctgctttgtcctttgatgctgtcagcactctgaggggagaaatcctgatctttaaagacaggcacttttggcgcaaatccctcaggaagcttgaacctgaattgcatttgatctcttcattttggccatctcttccttcaggcgtggatgccgcatatgaagttactagcaaggacctcgttttcatttttaaaggaaatcaattctgggctatcagaggaaatgaggtacgagctggatacccaagaggcatccacaccctaggtttccctccaaccgtgaggaaaatcgatgcagccatttctgataaggaaaagaacaaaacatatttctttgtagaggacaaatactggagatttgatgagaagagaaattccatggagccaggctttcccaagcaaatagctgaagactttccagggattgactcaaagattgatgctgtttttgaagaatttgggttcttttatttctttactggatcttcacagttggagtttgacccaaatgcaaagaaagtgacacacactttgaagagtaacagctggcttaattgttgaaagagatatgtagaaggcacaatatgggcactttaaatgaagctaataattcttcacctaagtctctgtgaattgaaatgttcgttttctcctgcctgtgctgtgactcgagtcacactcaagggaacttgagcgtgaatctgtatcttgccggtcatttttatgttattacagggcattcaaatgggctgctgcttagcttgcaccttgtcacatagagtgatctttcccaagagaaggggaagcactcgtgtgcaacagacaagtgactgtatctgtgtagactatttgcttatttaataaagacgatttgtcagttattttatctt

SEQ ID NO: 395 - DNA, 1147 bp, Homo sapiens
accaaatcaaccataggtccaagaacaattgtctctggacggcagctatgcgactcaccgtgctgtgtgctgtgtgcctgctgcctggcagcctggccctgccgctgcctcaggaggcgggaggcatgagtgagctacagtgggaacaggctcaggactatctcaagagattttatctctatgactcagaaacaaaaaatgccaacagtttagaagccaaactcaaggagatgcaaaaattctttggcctacctataactggaatgttaaactcccgcgtcatagaaataatgcagaagcccagatgtggagtgccagatgttgcagaatactcactatttccaaatagcccaaaatggacttccaaagtggtcacctacaggatcgtatcatatactcgagacttaccgcatattacagtggatcgattagtgtcaaaggctttaaacatgtggggcaaagagatccccctgcatttcaggaaagttgtatggggaactgctgacatcatgattggctttgcgcgaggagctcatggggactcctacccatttgatgggccaggaaacacgctggctcatgcctttgcgcctgggacaggtctcggaggagatgctcacttcgatgaggatgaacgctggacggatggtagcagtctagggattaacttcctgtatgctgcaactcatgaacttggccattctttgggtatgggacattcctctgatcctaatgcagtgatgtatccaacctatggaaatggagatccccaaaattttaaactttcccaggatgatattaaaggcattcagaaactatatggaaagagaagtaattcaagaaagaaatagaaacttcaggcagaacatccattcattcattcattggattgtatatcattgttgcacaatcagaattgataagcactgttcctccactccatttagcaattatgtcacccttttttattgcagttggtttttgaatgtctttcactccttttaaggataaactcctttatggtgtgactgtgtcttattcatctatacttgcagtgggtagatgtcaataaatgttacatacacaaataaataaaatgtttattccatggtaaatttaaaaaaaaaaaaaaaaaaaaaaaaaaaaa

SEQ ID NO: 396 - DNA, 1670 bp, Homo sapiens
attgagagtggctctaacaagtgccatttttccttgttagctttcatttctcagccctttacaagattaaaatagtctgcagtttaatctctccaaagctttacggacagtgattctgtcctaaacaagacagtgactccaggatttctgaagactattgtggaagaagcatccattaaggccaagctataacatcagaaatggtgaatgaatacaagaaaattcttttgctgaaaggatttgagctcatggatgattatcattttacatcaattaagtccttactggcctatgatttaggactaactacaaaaatgcaagaggaatacaacagaattaagattacagatttgatggaaaaaaagttccaaggcgttgcctgtctagacaaactaatagaacttgccaaagatatgccatcacttaaaaaccttgttaacaatcttcgaaaagagaagtcaaaagttgctaagaaaattaaaacacaagaaaaagctccagtgaaaaaaataaaccaggaagaagtgggtcttgcggcacctgcacccaccgcaagaaacaaactgacatcggaagcaagagggaggattcctgtagctcagaaaagaaaaactccaaacaaagaaaagactgaagccaaaaggaataaggtgtcccaagagcagagtaagcccccaggtccctcaggagccagcacatctgcagctgtggatcatcccccactaccccagacctcatcatcaactccatccaacacttcgtttactccgaatcaggaaacccaggcccaacggcaggtggatgcaagaagaaatgttccccaaaacgacccagtgacagtggtggtactgaaagcaacagcgccatttaaatacgagtccccagaaaatgggaaaagcacaatgtttcatgctacagtggccagtaagactcaatatttccatgtgaaagtcttcgacatcaacttgaaagagaaatttgtaaggaagaaggtcattaccatatctgattactctgaatgtaaaggagtaatggaaataaaggaagcatcatctgtgtctgactttaatcaaaattttgaggtcccaaacagaattatcgaaatagcaaataaaactcccaagatcagtcaactttacaagcaagcatctggaacaatggtgtatgggttgtttatgttacaaaagaaaagcgtacacaagaagaacacaatttatgaaatacaggataatacaggatccatggatgtagtggggagtggaaaatggcacaatatcaagtgtgagaaaggagataaacttcgactcttctgccttcaactgagaacagttgaccgcaagctgaaactggtgtgtggaagtcacagcttcatcaaggtcatcaaggccaagaaaaacaaggaaggaccaatgaatgttaattgaaatatgaaagctgaaatgcaacaaacaacttccgcttaaaacaattaagttgttaataactgtgattttgtaaatttcagtaattcatttaaatgatgtttcagtagatatattctagcatattaagagcttttataactgagttatagattagtttgctttctggaataaaattttcttcttatactcttccttttttttagatattacattttgcttttatgacattcacgaggcaaaaaaccg

SEQ ID NO: 397 - DNA, 2835 bp, Homo sapiens
gccagaaatcttcccagtagagatcaccatccgcccccgacccccaagctgaatacttaaggggtgggtccttcccatcaagctgatttctcaacgagagggacaatcccagcttccccaacattgcagagcccaaacatgtggaagagttggaagctccgcacagatgtcagagtaagggagggggcaggcggttctccttgtgcctcttcccagcccggtagcaggggcccatgcttcctccctggtctgtcctcgcaggaggtgtccaggcggaggcagttcctgcgggagcatgcggcccccttctccgccttcctcacagacagcttcggccggcagcacagctacctgcggatctccctcacagagaagtgcaacctcagatgtcagtactgcatgcccgaggagggggtcccgctgacccccaaagccaacctgctgaccacagaggagatcctgaccctcgcccggctctttgtgaaggaaggcatcgacaagatccggctcacaggtggagagccgcttatccggccggacgtggtggacattgtggcccagctccagcggctggaagggctgagaaccataggtgttaccaccaatggcatcaacctggcccggctactgccccagcttcagaaggctggtctcagtgccatcaacatcagcctggacaccctggtgcctgccaagtttgagttcattgtccgcaggaaaggcttccacaaggtcatggagggcatccacaaggccatcgagctgggctacaaccctgtgaaggtgaactgtgtggtgatgcgaggccttaacgaggatgaactcctggactttgcggccttgactgagggcctccccctggatgtgcgcttcatagagtatatgccctttgatggcaacaagtggaacttcaagaagatggtcagctataaggagatgctagacactgtccggcagcagtggccagagctggagaaggtgccagaggaggaatccagcacagccaaggcctttaaaatccctggcttccaaggccagatcagcttcatcacatccatgtctgagcatttctgtgggacctgcaaccgcctgcgaatcacagctgatgggaacctcaaggtctgcctctttggaaactctgaggtatccctgcgggatcacctgcgagctggggcctctgagcaggagctgctgagaatcattggggctgctgtgggcaggaagaagcggcagcatgcagagttatttttgatgttccccaattccccaccagccaatccaagcattttctcctgggacccgctccatgttcagggtctaagacccagaatgagtttctccagccaggtggccactttatggaaaggatgcagggtcccccagacccctcctctagcccagcagcggctggggtctggctcctttcagagacactacacttcccgtgcagactcagatgccaactcaaagtgccttagcccaggttcctgggcttctgctgccccctcaggaccccagctaacctcagaacaactaactcatgtggactcggaaggacgggcagctatggtagatgtgggcaggaagccagacacagagcgggtggctgtggcttcagccgtggtcctcctgggaccggtagccttcaagcttgtccagcagaaccagctcaagaaaggagatgccctagtggtggcccagctggctggagtccaggcagccaaggtgaccagccagctgatccctctgtgccaccacgtggccctgagccacatccaggtgcagctggagctggacagcacacgccatgccgtgaagatccaggcatcttgccgggctcggggccccaccggggtggagatggaggccctgacctctgctgcagtggccgccctcaccctgtatgacatgtgcaaggctgtcagcagggacatcgtgttggaggagatcaagctcattagcaagactggtggtcagcggggggacttccatcgggcttagcacctgcccttctcacccatggcccacccaggcctggagctgggatgcaatgtaggctgagggaaagacgtcaggttcctttaatcacagtcactgtttgtttaccttgagcagtaaacccgaagtcagcctgctctactactaacaaacaggcctgctgctagatgatctctaatgaccaatggggcttcctttctatagggaggataccagcaggcccttaagccttccaggacactaaggtcgtgggagcgggactgcaacaagcaatgccagataactgagaaatcatgttctttgtggactatttcagacaaccaggttccgacagtccagcccagaacttttccttctcattttgggttttctcttctcctgctttcctggggagagattaagcgctcattaagcagaggagcccactttgaggagagcaaagcacaagcttgcctgaagaatggatcccaacttctccccggcagctctgcctccctaagtctgtgaagccgcagccctgccctgtcctgtcctgtcctgacttcatctctccttctgcccaagtctgtgtcccatcagacttgcagcctttcagcttaacagttgcccggtcctgctggccccttttcctctggcccccctcttctgaaacaggatgtgcacacatgggccatagccctaaggactcctgccagaccacacagcccacacctggccctgttcacggctgttccacccacccctctttattctggagcatatcagggaaagaaaagttgatgatagattgccttcaccctcacagcgcacaaataaagctacgatgccaactttgca

SEQ ID NO: 398 - DNA, 3037 bp, Homo sapiens
gccagaaatcttcccagtagagatcaccatccgcccccgacccccaagctgaatacttaaggggtgggtccttcccatcaagctgatttctcaacgagagggacaatcccagcttccccaacattgcagagcccaaacatgtggaagagttggaagctccgcacagatgtcagagtaagggagggggcaggcggttctccttgtgcctcttcccagcccggtagcaggggcccatgcttcctccctggtctgtcctcgcaggaggtgtccaggcggaggcagttcctgcgggagcatgcggcccccttctccgccttcctcacagacagcttcggccggcagcacagctacctgcggatctccctcacagagaagtgcaacctcagatgtcagtactgcatgcccgaggagggggtcccgctgacccccaaagccaacctgctgaccacagaggagatcctgaccctcgcccggctctttgtgaaggaaggcatcgacaagatccggctcacaggtggagagccgcttatccggccggacgtggtggacattgtggcccagctccagcggctggaagggctgagaaccataggtgttaccaccaatggcatcaacctggcccggctactgccccagcttcagaaggctggtctcagtgccatcaacatcagcctggacaccctggtgcctgccaagtttgagttcattgtccgcaggaaaggcttccacaaggtcatggagggcatccacaaggccatcgagctgggctacaaccctgtgaaggtgaactgtgtggtgatgcgaggccttaacgaggatgaactcctggactttgcggccttgactgagggcctccccctggatgtgcgcttcatagagtatatgccctttgatggcaacaagtggaacttcaagaagatggtcagctataaggagatgctagacactgtccggcagcagtggccagagctggagaaggtgccagaggaggaatccagcacagccaaggcctttaaaatccctggcttccaaggccagatcagcttcatcacatccatgtctgagcatttctgtgggacctgcaaccgcctgcgaatcacagctgatgggaacctcaaggtctgcctctttggaaactctgaggtatccctgcgggatcacctgcgagctggggcctctgagcaggagctgctgagaatcattggggctgctgtgggcaggaagaagcggcagcatgcaggcatgttcagtatttcccagatgaagaaccggcccatgatcctcatcggtgggtgacccatcaagttatttttgatgttccccaattccccaccagccaatccaagcattttctcctgggacccgctccatgttcagggtctaagacccagaatgagtttctccagccaggtggccactttatggaaaggatgcagggtcccccagacccctcctctagcccagcagcggctggggtctggctcctttcagagacactacacttcccgtgcagactcagatgccaactcaaagtgccttagcccaggttcctgggcttctgctgccccctcaggaccccagctaacctcagaacaactaactcatgtggactcggaaggacgggcagctatggtagatgtgggcaggaagccagacacagagcgggtggctgtggcttcagccgtggtcctcctgggaccggtagccttcaagcttgtccagcagaaccagctcaagaaaggagatgccctagtggtggcccagctggctggagtccaggcagccaaggtgaccagccagctgatccctctgtgccaccacgtggccctgagccacatccaggtgcagctggagctggacagcacacgccatgccgtgaagatccaggcatcttgccgggctcggggccccaccggggtggagatggaggccctgacctctgctgcagtggccgccctcaccctgtatgacatgtgcaaggctgtcagcagggacatcgtgttggaggagatcaagctcattagcaagactggtggtcagcggggggacttccatcgggcttagcacctgcccttctcacccatggcccacccaggcctggagctgggatgcaatgtaggctgagggaaagacgtcaggttcctttaatcacagtcactgtttgtttaccttgagcagtaaacccgaagtcagcctgctctactactaacaaacaggcctgctgctagatgatctctaatgaccaatggggcttcctttctatagggaggataccagcaggcccttaagccttccaggacactaaggtcgtgggagcgggactgcaacaagcaatgccagataactgagaaatcatgttctttgtggactatttcagacaaccaggttccgacagtccagcccagaacttttccttctcattttgggttttctcttctcctgctttcctggggagagattaagcgctcattaagcagaggagcccactttgaggagagcaaagcacaagcttgcctgaagaatggatcccaacttctccccggcagctctgcctccctaagtctgtgaagccgcagccctgccctgtcctgtcctgtcctgacttcatctctccttctgcccaagtctgtgtcccatcagacttgcagcctttcagcttaacagttgcccggtcctgctggccccttttcctctggcccccctcttctgaaacaggatgtgcacacatgggccatagccctaaggactcctgccagaccacacagcccacacctggccctgttcacggctgttccacccacccctctttattctggagcatatcagggaaagaaaagttgatgatagattgccttcaccctcacagcgcacaaataaagctacgatgccaactttgcagatgcaagaatgaagacactgtgtgggtagggcactgagctgctgcagtttcacagggaaggctgcacctatcaatcaatcaatcaatcctatcccaagacacagttccctgagggaagaagaggagggacctggaaag

SEQ ID NO: 399 - DNA, 2883 bp, Homo sapiens
gccagaaatcttcccagtagagatcaccatccgcccccgacccccaagctgaatacttaaggggtgggtccttcccatcaagctgatttctcaacgagagggacaatcccagcttccccaacattgcagagcccaaacatgtggaagagttggaagctccgcacagatgtcagagtaagggagggggcaggcggttctccttgtgcctcttcccagcccggtagcaggggcccatgcttcctccctggtctgtcctcgcaggaggtgtccaggcggaggcagttcctgcgggagcatgcggcccccttctccgccttcctcacagacagcttcggccggcagcacagctacctgcggatctccctcacagagaagtgcaacctcagatgtcagtactgcatgcccgaggagggggtcccgctgacccccaaagccaacctgctgaccacagaggagatcctgaccctcgcccggctctttgtgaaggaaggcatcgacaagatccggctcacaggtggagagccgcttatccggccggacgtggtggacattgtggcccagctccagcggctggaagggctgagaaccataggtgttaccaccaatggcatcaacctggcccggctactgccccagcttcagaaggctggtctcagtgccatcaacatcagcctggacaccctggtgcctgccaagtttgagttcattgtccgcaggaaaggcttccacaaggtcatggagggcatccacaaggccatcgagctgggctacaaccctgtgaaggtgaactgtgtggtgatgcgaggccttaacgaggatgaactcctggactttgcggccttgactgagggcctccccctggatgtgcgcttcatagagtatatgccctttgatggcaacaagtggaacttcaagaagatggtcagctataaggagatgctagacactgtccggcagcagtggccagagctggagaaggtgccagaggaggaatccagcacagccaaggcctttaaaatccctggcttccaaggccagatcagcttcatcacatccatgtctgagcatttctgtgggacctgcaaccgcctgcgaatcacagctgatgggaacctcaaggtctgcctctttggaaactctgaggtatccctgcgggatcacctgcgagctggggcctctgagcaggagctgctgagaatcattggggctgctgtgggcaggaagaagcggcagcatgcaggcatgttcagtatttcccagatgaagaaccggcccatgatcctcatcgagttatttttgatgttccccaattccccaccagccaatccaagcattttctcctgggacccgctccatgttcagggtctaagacccagaatgagtttctccagccaggtggccactttatggaaaggatgcagggtcccccagacccctcctctagcccagcagcggctggggtctggctcctttcagagacactacacttcccgtgcagactcagatgccaactcaaagtgccttagcccaggttcctgggcttctgctgccccctcaggaccccagctaacctcagaacaactaactcatgtggactcggaaggacgggcagctatggtagatgtgggcaggaagccagacacagagcgggtggctgtggcttcagccgtggtcctcctgggaccggtagccttcaagcttgtccagcagaaccagctcaagaaaggagatgccctagtggtggcccagctggctggagtccaggcagccaaggtgaccagccagctgatccctctgtgccaccacgtggccctgagccacatccaggtgcagctggagctggacagcacacgccatgccgtgaagatccaggcatcttgccgggctcggggccccaccggggtggagatggaggccctgacctctgctgcagtggccgccctcaccctgtatgacatgtgcaaggctgtcagcagggacatcgtgttggaggagatcaagctcattagcaagactggtggtcagcggggggacttccatcgggcttagcacctgcccttctcacccatggcccacccaggcctggagctgggatgcaatgtaggctgagggaaagacgtcaggttcctttaatcacagtcactgtttgtttaccttgagcagtaaacccgaagtcagcctgctctactactaacaaacaggcctgctgctagatgatctctaatgaccaatggggcttcctttctatagggaggataccagcaggcccttaagccttccaggacactaaggtcgtgggagcgggactgcaacaagcaatgccagataactgagaaatcatgttctttgtggactatttcagacaaccaggttccgacagtccagcccagaacttttccttctcattttgggttttctcttctcctgctttcctggggagagattaagcgctcattaagcagaggagcccactttgaggagagcaaagcacaagcttgcctgaagaatggatcccaacttctccccggcagctctgcctccctaagtctgtgaagccgcagccctgccctgtcctgtcctgtcctgacttcatctctccttctgcccaagtctgtgtcccatcagacttgcagcctttcagcttaacagttgcccggtcctgctggccccttttcctctggcccccctcttctgaaacaggatgtgcacacatgggccatagccctaaggactcctgccagaccacacagcccacacctggccctgttcacggctgttccacccacccctctttattctggagcatatcagggaaagaaaagttgatgatagattgccttcaccctcacagcgcacaaataaagctacgatgccaactttgca

SEQ ID NO: 400 - DNA, 1005 bp, Homo sapiens
atggtagagttcgcgcccttgtttatgccgtgggagcgcaggctgcagacacttgctgtcctacagtttgtcttctccttcttggcactggccgagatctgcactgtgggcttcatagccctcctgtttacaagattctggctcctcactgtcctgtatgcggcctggtggtatctggaccgagacaagccacggcaggggggccggcacatccaggccatcaggtgctggactatatggaagtacatgaaggactatttccccatctcgctggtcaagactgctgagctggacccctctcggaactacattgcgggcttccacccccatggagtcctggcagtcggagcctttgccaacctgtgcactgagagcacaggcttctcttcgatcttccccggtatccgcccccatctgatgatgctgaccttgtggttccgggcccccttcttcagagattacatcatgtctgcagggttggtcacatcagaaaaggagagtgctgctcacattctgaacaggaagggtggcggaaacttgctgggcatcattgtagggggtgcccaggaggccctggatgccaggcctggatccttcacgctgttactgcggaaccgaaagggcttcgtcaggctcgccctgacacacggggcacccctggtgccaatcttctccttcggggagaatgacctatttgaccagattcccaactcttctggctcctggttacgctatatccagaatcggttgcagaagatcatgggcatctccctcccactctttcatggccgtggtgtcttccagtacagctttggtttaataccctaccgccggcccatcaccactgtggtggggaagcccatcgaggtacagaagacgctgcatccctcggaggaggaggtgaaccagctgcaccagcgttatatcaaagagctgtgcaacctcttcgaggcccacaaacttaagttcaacatccctgctgaccagcacttggagttctgctga

SEQ ID NO: 401 - DNA, 3815 bp, Homo sapiens
agtcgccgggtcggtagaggtgctgacagggcggagccgccgcttgcctcagccggcctcacccctcccgcccgggacaggtggctggagcgcgctccgcctccgccagctgcgagtgggagcgagggagggccggtcccggacggtcgccgccagctgcgagtggaagtgagcgagggctagtcccggaccgccgggccaggggtccggcggcagcagacgggtaccgtggcggccaaaaaaatgctcctgtaccgaggggcccccgccggccctggcgcgccgggctgcgggctggcccggcccggcggcggcccgcaggccttcgggatccgcctgagcacgatgagcccccgctacctccagagcaactccagcagccacacgcgacccttcagtgccatcgcggagctgctagataatgctgtagatccagatgtatctgccaggacggtctttatagatgttgaggaggtcaagaataaatcttgtttgacctttaccgatgatggatgtgggatgacacctcataaactacaccgaatgctcagctttggctttacagataaagtaataaagaagagccagtgtcccattggggtctttggtaatggtttcaagtcaggctccatgcggctaggaaaggacgcccttgtcttcaccaagaatgggggtactctcactgttggacttctatcacagacctatctggaatgtgtccaggcccaggcagttattgtaccaattgttccattcaaccagcaaaacaaaaaaatgattattaccgaggattcattgcccagcctagaagccatcttgaactattccattttcaaccgtgaaaatgacctgctggcccagtttgatgccatcccaggcaaaaaaggcactcgtgttctcatttggaacatccgcagaaataaaaatggaaaatctgagttggactttgatacagatcaatatgacatcctggtatcagactttgacacagaagaaaaaatgactggcggtgttacctctgagctaccagaaacagaatattctttaagggcattttgtggtattctatacatgaagccacgcatgaaaatttttctgcgtcaaaagaaggtgactacccagatgattgccaagagcctggccaatgtagaatatgatacatataaacctaccttcacaaataagcaggtgagaatcacctttgggttctcttgcaagaatagtaaccagtttggaataatgatgtatcataacaaccgactcataaaatcttttgagaaggtggggtgccaggtgaagccaactcgtggagaaggtgtaggagtaattggagtcattgagtgcaatttcctaaaacctgcctacaacaaacaagactttgagtataccaaggagtaccggctaacaataaatgcccttgcccagaagctcaatgcttactggaaggaaaaaacatctcaagataattttgagacctcaactgtagccaggccaataccgaaggttcctgaccagacatgggttcagtgtgatgagtgtcttaaatggagaaagcttcctgggaagattgatccatccatgttacctgcaagatggttttgttattataattcccatccaaagtacaggagatgctctgttccagaggaacaagaactcactgatgaagacctgtgcttgagcaaagctaagaaacaagaacaaactgttgaggagaagaagaagatgcctatggaaaatgagaaccaccaggtattcagtaatccaccaaagatccttactgttcaagaaatggctggattgaataacaagacaattggatatgagggaattcatagccctagtgtgcttccttctggtggagaagaaagcagatcaccatctcttcaacttaagcctctggattccagtgttttacagttttccagtaagtacaaatggatcctaggtgaagaaccggtggagaaacgaagaaggctccagaatgagatgacaacaccttctctagattattccatgcctgctccttacaggagggtagaagcacctgttgcctacccagaaggggagaacagccatgataaatcgagttctgagagaagtacaccaccataccttttcccagaatacccagaagcaagcaagaatacaggtcagaatagggaggtttcaattctgtatccaggggccaaagaccaacgccaggggtccctgcttcctgaagaattagaagatcagatgccaagattggtggcagaagaatctaacagaggtagcacaaccataaacaaagaagaagtcaacaagggaccttttgtagctgttgtgggtgttgccaaaggtgttagagattcaggagctcccattcagctgatcccttttaacagagaggagcttgctgagagacgaaaagcagttgaatcctggaacccagtgccttattctgtggcctctgctgcaatccctgctgcagccattggggagaaagcaagaggctatgaggagagcgaaggtcataatacaccaaagttgaagaaccagagagagctggaagaattgaagagaaccacagaaaaattggaacgtgttttggctgaaaggaatttgttccagcaaaaggtggaggagctggaacaggagaggaatcactggcagtctgaattcaagaaagtccaacatgaattggtgatctacagtacccaggaggcggaaggcttgtactggagcaagaaacacatgggttatcgccaagctgaattccagattctgaaagctgagctggaaagaaccaaagaggaaaagcaagagttaaaagagaaactgaaggaaacagagacacacctggaaatgctgcagaaggctcaggtctcctaccggaccccagagggagatgacctagaaagggctttggcaaagcttacgcggctacgtatccacgtcagctatctccttacttctgtcctccctcacttggagcttcgtgagatcgggtatgactcagaacaagtggatgggatcctgtacacggtgctggaggcaaatcacatactggattgagcaccagactgtatacccttctcttctcttatcttctgtctgttctcttttctctccctccctcacgtctctctctctctctctctctctctctctctctctctctcaccctcacctttatgccttatatagagaatctctgtgtaaatcctggctcataatcagtctcctttttatcagttttggtgtggagaaagaggccagtttaaataggctttcaagagtctagggtcagaaaagcaatagtcactaagctaggtgacctgaaagctttaattttcatgacctggatatgtggtctattgtatatctttttctgaaatggtttgtattcatttaggttagatcaatcagcagatattgggtccggtataccaggtattattttggggtaagctaacaagtacaactcatgtttgcagccttcgaagatgtaacaatctcgttggaaacataagacatacatcacattatacacaaaagtgtatgatatgtacaactgagtggtacagatatgacatggaagatctgggggaggaagttcaaggaaggcaccacaccagaaatgggacctaaattaaggcttaaagaatgagcatggccacactgtcagtgagtgttctttaggtggtaggactatggttgatatttttcttcttcctatcttcctgcctttttcagattttcaatattaaacttgttattcttacattggaaaaaaataaattgtttttaaaaagatcaaaaaaaaaaaaaaa

SEQ ID NO: 402 - DNA, 1626 bp, Homo sapiens
gggcggagcgggcgtacccccacggcccggccagtggaaggcgcgggcagcagcggctccgagtggccgcggcggtgggctgtgccggagtctcctccctttggtccgctgcaggttggtggcgggaggaggggacagctgcgggcgcggggagggggcgccgcgccgcgggggccatggcggagccaggaagccgggagtccgagacccgggtcgccaatataaatgcttgatgagtgaatgaatgacttccgtctgggacttggttgcaaataaagccgagctgcatcttagggaggggtggagactttgcccctgtttgtgccttgaagccagcagggccttgccctaggatacctccacccaccctcctgcccagcaagtggaggcccgcagcccgagtgtcgccgccatggcttcgccgcagctctgccgcgcgctggtgtcggcgcaatgggtggcggaggcgctgcgggccccgcgcgctgggcagcctctgcagctgctggacgcctcctggtacctgccgaagctggggcgcgacgcgcgacgcgagttcgaggagcgccacatcccgggcgccgctttcttcgacatcgaccagtgcagcgaccgcacctcgccctacgaccacatgctgcccggggccgagcatttcgcggagtacgcaggccgcctgggcgtgggcgcggccacccacgtcgtgatctacgacgccagcgaccagggcctctactccgccccgcgcgtctggtggatgttccgcgccttcggccaccacgccgtgtcactgcttgatggcggcctccgccactggctgcgccagaacctcccgctcagctccggcaagagccaacctgctcccgccgagttccgcgctcagctcgaccccgccttcatcaagacctacgaggacatcaaggagaacctggaatcccggcgcttccaggtggtggactcccgagccactggcaggttccgcggcaccgagcccgagccccgagacggcattgaacctggccacatcccaggtaccgtgaacatccccttcacagacttcctgagccaggaggggctggagaagagccctgaggagatccgccatctgttccaggagaagaaagtggacctgtctaagccactggtggccacgtgtggctctggcgtcacagcctgccacgtggcactaggggcctacctctgcggcaagccagacgtgcccatctacgatggctcctgggtggagtggtacatgcgcgcccggcccgaggatgtcatctcagagggccgggggaagacccactgaagctgggcaggacacaggcgagctcaggtgatgccggccaccagcaatgcctggcctggtagctccgcttctgctttcaccaagagagtgtttcttcactcaactcaggtggcatttggggtgacatctcaaaggccaggaattccgttgacttgttggctgccagtaggggcgggaggaaaggcggaggcgagccctggaggagggaggccacaactccgagctgcccacctggtgctgagctggggccccgcctcctttctgttttatttttgaggaaataaaataaccaagtgctaaatcttgtaaaaaaaaaaaaa

SEQ ID NO: 403 - DNA, 1450 bp, Homo sapiens
gggcggagcgggcgtacccccacggcccggccagtggaaggcgcgggcagcagcggctccgagtggccgcggcggtgggctgtgccggagtctcctccctttggtccgctgcaggttggtggcgggaggaggggacagctgcgggcgcggggagggggcgccgcgccgcgggggccatggcggagccaggaagccgggagtccgagacccgggcccgcagcccgagtgtcgccgccatggcttcgccgcagctctgccgcgcgctggtgtcggcgcaatgggtggcggaggcgctgcgggccccgcgcgctgggcagcctctgcagctgctggacgcctcctggtacctgccgaagctggggcgcgacgcgcgacgcgagttcgaggagcgccacatcccgggcgccgctttcttcgacatcgaccagtgcagcgaccgcacctcgccctacgaccacatgctgcccggggccgagcatttcgcggagtacgcaggccgcctgggcgtgggcgcggccacccacgtcgtgatctacgacgccagcgaccagggcctctactccgccccgcgcgtctggtggatgttccgcgccttcggccaccacgccgtgtcactgcttgatggcggcctccgccactggctgcgccagaacctcccgctcagctccggcaagagccaacctgctcccgccgagttccgcgctcagctcgaccccgccttcatcaagacctacgaggacatcaaggagaacctggaatcccggcgcttccaggtggtggactcccgagccactggcaggttccgcggcaccgagcccgagccccgagacggcattgaacctggccacatcccaggtaccgtgaacatccccttcacagacttcctgagccaggaggggctggagaagagccctgaggagatccgccatctgttccaggagaagaaagtggacctgtctaagccactggtggccacgtgtggctctggcgtcacagcctgccacgtggcactaggggcctacctctgcggcaagccagacgtgcccatctacgatggctcctgggtggagtggtacatgcgcgcccggcccgaggatgtcatctcagagggccgggggaagacccactgaagctgggcaggacacaggcgagctcaggtgatgccggccaccagcaatgcctggcctggtagctccgcttctgctttcaccaagagagtgtttcttcactcaactcaggtggcatttggggtgacatctcaaaggccaggaattccgttgacttgttggctgccagtaggggcgggaggaaaggcggaggcgagccctggaggagggaggccacaactccgagctgcccacctggtgctgagctggggccccgcctcctttctgttttatttttgaggaaataaaataaccaagtgctaaatcttgtaaaaaaaaaaaaa

SEQ ID NO: 404 - DNA, 1352 bp, Homo sapiens
gggcggagcgggcgtacccccacggcccggccagtggaaggcgcgggcagcagcggctccgagtggccgcggcggtgggctgtgccggagtctcctccctttggtccgctgcaggcccgcagcccgagtgtcgccgccatggcttcgccgcagctctgccgcgcgctggtgtcggcgcaatgggtggcggaggcgctgcgggccccgcgcgctgggcagcctctgcagctgctggacgcctcctggtacctgccgaagctggggcgcgacgcgcgacgcgagttcgaggagcgccacatcccgggcgccgctttcttcgacatcgaccagtgcagcgaccgcacctcgccctacgaccacatgctgcccggggccgagcatttcgcggagtacgcaggccgcctgggcgtgggcgcggccacccacgtcgtgatctacgacgccagcgaccagggcctctactccgccccgcgcgtctggtggatgttccgcgccttcggccaccacgccgtgtcactgcttgatggcggcctccgccactggctgcgccagaacctcccgctcagctccggcaagagccaacctgctcccgccgagttccgcgctcagctcgaccccgccttcatcaagacctacgaggacatcaaggagaacctggaatcccggcgcttccaggtggtggactcccgagccactggcaggttccgcggcaccgagcccgagccccgagacggcattgaacctggccacatcccaggtaccgtgaacatccccttcacagacttcctgagccaggaggggctggagaagagccctgaggagatccgccatctgttccaggagaagaaagtggacctgtctaagccactggtggccacgtgtggctctggcgtcacagcctgccacgtggcactaggggcctacctctgcggcaagccagacgtgcccatctacgatggctcctgggtggagtggtacatgcgcgcccggcccgaggatgtcatctcagagggccgggggaagacccactgaagctgggcaggacacaggcgagctcaggtgatgccggccaccagcaatgcctggcctggtagctccgcttctgctttcaccaagagagtgtttcttcactcaactcaggtggcatttggggtgacatctcaaaggccaggaattccgttgacttgttggctgccagtaggggcgggaggaaaggcggaggcgagccctggaggagggaggccacaactccgagctgcccacctggtgctgagctggggccccgcctcctttctgttttatttttgaggaaataaaataaccaagtgctaaatcttgtaaaaaaaaaaaaa

SEQ ID NO: 405 - DNA, 2308 bp, Homo sapiens
gggctcctgagcggggcattccttcctgaagcctcatccccgctcagccctgctcagcccctcctcctactcccctccccctccccctcctgccgggccaggaattgggtttggggcgggttctgcttccaaagccatctcttccagcaggagagggctctactctgagctcctattttccaaggctccgggccgcgctcggcgctggcctgctgccccggcgggtccgccggccggaggcgggagtcacaggaagagccctccacaaaaggaggcctcggcggatcaggacagctgcaggtgggtgtgcagactggtgagctgccagcaggggcccagacgcgccaggcctggagatggctggaaactgctcctgggaggcccatcccggcaacaggaacaagatgtgccctggcctgagcgaggccccggaactctacagccggggcttcctgaccatcgagcagatcgcgatgctgccgcctccggccgtcatgaactacatcttcctgctcctctgcctgtgtggcctggtgggcaacgggctggtcctctggtttttcggcttctccatcaagaggaaccccttctccatctacttcctgcacctggccagcgccgatgtgggctacctcttcagcaaggcggtgttctccatcctgaacacggggggcttcctgggcacgtttgccgactacatccgcagcgtgtgccgggtcctggggctctgcatgttccttaccggcgtgagcctcctgccggccgtcagcgccgagcgctgcgcctcggtcatcttccccgcctggtactggcgccggcggcccaagcgcctgtcggccgtggtgtgcgccctgctgtgggtcctgtccctcctggtcacctgcctgcacaactacttctgcgtgttcctgggccgcggggcccccggcgcggcctgcaggcacatggacatcttcctgggcatcctcctgttcctgctctgctgcccgctcatggtgctgccctgcctggccctcatcctgcacgtggagtgccgggcccgacggcgccagcgctctgccaagctcaaccacgtcatcctggccatggtctccgtcttcctggtgtcctccatctacttagggatcgactggttcctcttctgggtcttccagatcccggcccccttccccgagtacgtcactgacctgtgcatctgcatcaacagcagcgccaagcccatcgtctacttcctggccgggagggacaagtcgcagcggctgtgggagccgctcagggtggtcttccagcgggccctgcgggacggcgctgagctgggggaggccgggggcagcacgcccaacacagtcaccatggagatgcagtgtcccccggggaacgcctcctgagactccagcgcctggaggaggcaggggcaggaagcggcctccaagacccttcgccttgggacaggaatgggcacctgcttctgagtccatacaggagaagaaagatctgtttcctctcctcgggcctccttctccctgggctggggactccaggggtggctgggagactgggcagccaccagcaaacagaccctgtggcccctgcccggctcccccacccattctgctcccctagagacctcttgtacagaagttgcccccaggtggtggggcccctccttgccctaggctggttggtaaaagagaggaggtcaacacccagcctagccacctctgcctcttgggtcagccctccttgactgtgtcccagccagcaccaggccagcagcctcatccctgccattcagggctgttccagagattcgatcctcttaaggcattatcagtgagcaaatgtgaaggaaatggtgtctggaagaaagttctggttcacatgccttgtagctaagtctttctgcaaacaacctcccttccccccgtcgagtcatttggtgactttgatggggggatttctggttatgtcaaggctctggagacaggaagggcctttggccgccttgggtagttgacctgccttttctgactccgggacgagccagtcctaggctgcctccgggagcacttgaggtatcccgcaggccatgaggacccactgggcagctcctggacagcctcttggctccagcccccacccgaaagtggacactggctccgccctggccacctggggactggcactgtggtgcacagtggcccaatgtggccaacggaagttttataaaagacaaaatgtatatcaataaacattttataacttgcagccaaaaaaaaaaaaaaaaaaaaaaaaaaaaaaaaaaaaa

SEQ ID NO: 406 - DNA, 3723 bp, Homo sapiens
aacccatttcaactgcctattcagagcatgcagtaagaggaaatccaccaagtctcaatataataatattctttattcctggacagctcggttaatgaaaaaatggacacagaaagtaataggagagcaaatcttgctctcccacaggagccttccagtgtgcctgcatttgaagtcttggaaatatctccccaggaagtatcttcaggcagactattgaagtcggcctcatccccaccactgcatacatggctgacagttttgaaaaaagagcaggagttcctgggggtaacacaaattctgactgctatgatatgcctttgttttggaacagttgtctgctctgtacttgatatttcacacattgagggagacattttttcatcatttaaagcaggttatccattctggggagccatatttttttctatttctggaatgttgtcaattatatctgaaaggagaaatgcaacatatctggtgagaggaagcctgggagcaaacactgccagcagcatagctgggggaacgggaattaccatcctgatcatcaacctgaagaagagcttggcctatatccacatccacagttgccagaaattttttgagaccaagtgctttatggcttccttttccactgaaattgtagtgatgatgctgtttctcaccattctgggacttggtagtgctgtgtcactcacaatctgtggagctggggaagaactcaaaggaaacaaggttccagaggatcgtgtttatgaagaattaaacatatattcagctacttacagtgagttggaagacccaggggaaatgtctcctcccattgatttataagaatcacgtgtccagaacactctgattcacagccaaggatccagaaggccaaggtcttgttaaggggctactggaaaaatttctattctctccacagcctgctggttttacattagatttattcgcctgataagaatattttgtttctgctgcttctgtccaccttaatattctccttctatttgtagatatgatagactcctatttttcttgttttatattatgaccacacacatctctgctggaaagtcaacatgtagtaagcaagatttaactgtttgattataactgtgcaaatacagaaaaaaagaaggctggctgaaagttgagttaaactttgacagtttgataatatttggttcttagggttttttttttttttagcattcttaatagttacagttgggcatgatttgtaccatccacccatacccacacagtcacagtcacacacacatatgtattacttacactatatataacttcctatgcaaatattttaccaccagtcaataatacatttttgccaagacatgaagttttataaagatctgtataattgcctgaatcaccagcacattcactgacatgatattatttgcagattgacaagtaggaagtggggaattttattaagttactcgttgtctggggaggtaaataggttaaaaacagggaaattataagtgcagagattaacatttcacaaatgtttagtgaaacatttgtgaaaaaagaagactaaattaagacctgagctgaaataaagtgagtggaaatggaaataatggttatatctaaaacatgtagaaaaagagtaactggtagattttgttaacaaattaaagaataaagttagacaagcaactggttgactaatacattaagcgtttgagtctaagatgaaaggagaacactggttatgttgatagaatgataaaaagggtcgggcgcggaggctcacgcctgtaatcccagccctttgggaggccgaggtgggcagatcacgaagtcagtagtttgagaccagcctggccaacatagtgaaaccccgtctctactaaaaatacaaaaaaaaaattagctgggtgtggtggcagtcacctgtagtcccagctacttgggaggatgaggcaggagaatcgcttgaacctgggaggcggaggttgcagtgagccgagatcgcaccagtgcactccagccttggtgacaatgggagactccatctcaaaaaaaaaaaaaaaaaaaaaaagataaaaagtcagaaatctgaaaagtggaggaagagtacaaatagacctaaattaagctcatttttaggctttgattttggggagacaaagggaaatgcagccatagagggcctgatgacatccaatacagagttctggtaaagataaaatttgatacaggtttggtgtcattataagagaaatcattattaaatgaagcaagttaacactctaagagaattattttgagatagaagtgaagctaagctaaacttcacatgcctataattggagggaaaaactaaggataaaatctagcctagaagatacaataattagtcataaacatgcattgtgaaactgtagagagcaggtagcccaaaatagagaaagattagataaagagaaaataagtatccatcagagacagtatctctaggcttgggcaagagaaaagtccacagtgataagcaactccacctaaggcatgaatatgcggcagagaaaacagcaatagtgaatgaatgcaaaaggtgctgagaaattccacacatgagtattgtgatgagtaaatgaataaaacatttgcaaagacctttagagaaagagaatgggagcatatgtgagaaataagatagttgattatgaatagaaggtagtgaagaaaagcaagctaagaaaaaattctgtttataaaagaaggaaaagatagtttatgtttttagcctaagtataagagtcctacagatggactgaaaaaaatcagtctgagagtattagtcacaattaatgaaataattacattttatgtattgaggatgccaagattaaaaggtgacaggtagatgttaatttccctagattgtgaaagtgatcacgacaatcacacaacaaataattaagtgacttggtatgctttatttaattgtagggcctgaggttttccattctcatttttctaaaatacaattttgtttctccaaatttgacagcagaataaaaaccctaccctttcactgtgtatcatgctaagctgcatctctactcttgatcatctgtaggtattaatcacatcacttccatggcatggatgttcacatacagactcttaaccctggtttaccaggacctctaggagtggatccaatctatatctttacagttgtatagtatatgatatctcttttatttcactcaatttatattttcatcattgactacatatttcttatacacaacacacaatttatgaattttttctcaagatcattctgagagttgccccaccctacctgccttttatagtatgcccacctcaggcagacacagagcacaatgctggggttctcttcacactatcactgccccaaattgtctttctaaatttcaacttcaatgtcatcttctccatgaagaccactgaatgaacaccttttcatccagccttaatttcttgctccataactactctatcccacgatgcagtattgtatcattaattattagtgtgcttgtgacctccttatgtattctcaattacctgtatttgtgcaataaattggaataatgtaacttgatttcttatctgtgtttgtgttggcatgcaagatttaggtacttatcaaagataatggggaattaaggcatcaataaa

SEQ ID NO: 407 - DNA, 2208 bp, Homo sapiens
ggggcctgccacgaggccgcagtataaccgcgtggcccgcgcgcgcgcttccctcccggcgcagtcaccggcgcggtctatggctgcgacttctctaatgtctgctttggctgcccggctgctgcagcccgcgcacagctgctcccttcgccttcgccctttccacctcgcggcagttcgaaatgaagctgttgtcatttctggaaggaaactggcccagcagatcaagcaggaagtgcggcaggaggtagaagagtgggtggcctcaggcaacaaacggccacacctgagtgtgatcctggttggcgagaatcctgcaagtcactcctatgtcctcaacaaaaccagggcagctgcagttgtgggaatcaacagtgagacaattatgaaaccagcttcaatttcagaggaagaattgttgaatttaatcaataaactgaataatgatgataatgtagatggcctccttgttcagttgcctcttccagagcatattgatgagagaaggatctgcaatgctgtttctccagacaaggatgttgatggctttcatgtaattaatgtaggacgaatgtgtttggatcagtattccatgttaccggctactccatggggtgtgtgggaaataatcaagcgaactggcattccaaccctagggaagaatgtggttgtggctggaaggtcaaaaaacgttggaatgcccattgcaatgttactgcacacagatggggcgcatgaacgtcccggaggtgatgccactgttacaatatctcatcgatatactcccaaagagcagttgaagaaacatacaattcttgcagatattgtaatatctgctgcaggtattccaaatctgatcacagcagatatgatcaaggaaggagcagcagtcattgatgtgggaataaatagagttcacgatcctgtaactgccaaacccaagttggttggagatgtggattttgaaggagtcagacaaaaagctgggtatatcactccagttcctggaggtgttggccccatgacagtggcaatgctaatgaagaataccattattgctgcaaaaaaggtgctgaggcttgaagagcgagaagtgctgaagtctaaagagcttggggtagccactaattaactactgtgtcttctgtgtcacaaacagcactccaggccagctcaagaagcaaagcaggccaatagaaatgcaatatttttaatttattctactgaaatggtttaaaatgatgccttgtatttattgaaagcttaaatgggtgggtgtttctgcacatacctctgcagtacctcaccagggagcattccagtatcatgcagggtcctgtgatctagccaggagcagccattaacctagtgattaatatgggagacattaccatatggaggatggatgcttcactttgtcaagcacctcagttacacattcgccttttctaggattgcatttcccaagtgctattgcaataacagttgatactcattttaggtaccaaaccttttgagttcaactgatcaaaccaaaggaaaagtgttgctagagaaaattagggaaaaggtgaaaaagaaaaaatggtagtaattgagcagaaaaaaattaatttatatatgtattgattggcaaccagatttatctaagtagaactgaattggctaggaaaaaagaaaaactgcatgttaatcattttcctaagctgtccttttgaggcttagtcagtttattgggaaaatgtttaggattattccttgctattagtactcattttatgtatgttacccttcagtaagttctccccattttagttttctaggactgaaaggattcttttctacattatacatgtgtgttgtcatatttggcttttgctatatactttaacttcattgttaaatttttgtattgtatagtttctttggtgtatcttaaaacctatttttgaaaaacaaacttggcttgataatcatttgggcagcttgggtaagtacgcaacttacttttccaccaaagaactgtcagcagctgcctgcttttctgtgatgtatgtatcctgttgacttttccagaaattttttaagagtttgagttactattgaatttaatcagactttctgattaaagggttttctttcttttttaataaaacacatctgtctggtatggtatgaatttctgaaaaaaaaaaaaaaaaaaaaaaa

SEQ ID NO: 408 - DNA, 2306 bp, Homo sapiens
ggggcctgccacgaggccgcagtataaccgcgtggcccgcgcgcgcgcttccctcccggcgcagtcaccggcgcggtctatggctgcgacttctctaatgtctgctttggctgcccggctgctgcagcccgcgcacagctgctcccttcgccttcgccctttccacctcgcggcagttcggggaatctctccctaggtcaggttggagtgcagtgctgcaatcacggcttactgcagccttgacctcctgggctcaagtgatcctcccacctcagcttaaatgaagctgttgtcatttctggaaggaaactggcccagcagatcaagcaggaagtgcggcaggaggtagaagagtgggtggcctcaggcaacaaacggccacacctgagtgtgatcctggttggcgagaatcctgcaagtcactcctatgtcctcaacaaaaccagggcagctgcagttgtgggaatcaacagtgagacaattatgaaaccagcttcaatttcagaggaagaattgttgaatttaatcaataaactgaataatgatgataatgtagatggcctccttgttcagttgcctcttccagagcatattgatgagagaaggatctgcaatgctgtttctccagacaaggatgttgatggctttcatgtaattaatgtaggacgaatgtgtttggatcagtattccatgttaccggctactccatggggtgtgtgggaaataatcaagcgaactggcattccaaccctagggaagaatgtggttgtggctggaaggtcaaaaaacgttggaatgcccattgcaatgttactgcacacagatggggcgcatgaacgtcccggaggtgatgccactgttacaatatctcatcgatatactcccaaagagcagttgaagaaacatacaattcttgcagatattgtaatatctgctgcaggtattccaaatctgatcacagcagatatgatcaaggaaggagcagcagtcattgatgtgggaataaatagagttcacgatcctgtaactgccaaacccaagttggttggagatgtggattttgaaggagtcagacaaaaagctgggtatatcactccagttcctggaggtgttggccccatgacagtggcaatgctaatgaagaataccattattgctgcaaaaaaggtgctgaggcttgaagagcgagaagtgctgaagtctaaagagcttggggtagccactaattaactactgtgtcttctgtgtcacaaacagcactccaggccagctcaagaagcaaagcaggccaatagaaatgcaatatttttaatttattctactgaaatggtttaaaatgatgccttgtatttattgaaagcttaaatgggtgggtgtttctgcacatacctctgcagtacctcaccagggagcattccagtatcatgcagggtcctgtgatctagccaggagcagccattaacctagtgattaatatgggagacattaccatatggaggatggatgcttcactttgtcaagcacctcagttacacattcgccttttctaggattgcatttcccaagtgctattgcaataacagttgatactcattttaggtaccaaaccttttgagttcaactgatcaaaccaaaggaaaagtgttgctagagaaaattagggaaaaggtgaaaaagaaaaaatggtagtaattgagcagaaaaaaattaatttatatatgtattgattggcaaccagatttatctaagtagaactgaattggctaggaaaaaagaaaaactgcatgttaatcattttcctaagctgtccttttgaggcttagtcagtttattgggaaaatgtttaggattattccttgctattagtactcattttatgtatgttacccttcagtaagttctccccattttagttttctaggactgaaaggattcttttctacattatacatgtgtgttgtcatatttggcttttgctatatactttaacttcattgttaaatttttgtattgtatagtttctttggtgtatcttaaaacctatttttgaaaaacaaacttggcttgataatcatttgggcagcttgggtaagtacgcaacttacttttccaccaaagaactgtcagcagctgcctgcttttctgtgatgtatgtatcctgttgacttttccagaaattttttaagagtttgagttactattgaatttaatcagactttctgattaaagggttttctttcttttttaataaaacacatctgtctggtatggtatgaatttctgaaaaaaaaaaaaaaaaaaaaaaa

SEQ ID NO: 409 - DNA, 2324 bp, Homo sapiens
acagacactgatctcagtttcccccgagagtgtgagtgtaggcctctacaggcagctgcctctggggagttggggagcctaggggttaactctagacccccctcaaccctctggaccaaagtctgtccaggaaaataggatgccggagcccaggagtcgtcagcctagcagttgcctggcctccagatgcctcccagggtcaccttccagccctgtggatggcagtggaatcaggacactcccttgaacagtgaatacgattttgccctggtcaacattggacgattagaggctgtgagcggcttgtcccgagtccagctcctccgtccagggtccctgcataaatttatccctgaggagattctgattcatggccgagacttccggctgctcagagttggttttgaggctggaggcctagagcctcaggcttttcaggtgaccatggccattgtccaagccagagctcagagcaatcaagcccaacagtattcggggataaccctgagcaaggctggccagggttctggctccagaaaaccaccaattcctctcatggagacagcggaagactgggagactgagcggaagaagcaggcagccagaggctggagggtcagcacggtcaacgagaggttcgacgtagccaccagcctcccccgttacttctgggtccctaaccgaattctggacagtgaggtcaggagagcatttggccactttcatcagggccgtggaccgcgcttgtcctggcatcaccctgggggcagtgatcttctccgctgtggaggcttctatacagccagtgaccctaacaaggaggatatcagagcagtggagttgatgctccaggctgggcattcagatgttgtcctggtagacactatggatgagctgcccagccttgcagatgtccaacttgcccacctgaggctgagggccctctgcctgcctgattcatctgtagctgaggataaatggctttcagccctggaaggaacacgatggctggactatgtcagggcttgtcttcgaaaggccagtgacatttcagtattagtgacatccagggttcgttctgtaatacttcaagagcgcggtgatcgtgatctcaatggcctcctctcttcactcgtccagctgctttcagcccccgaagcccgaacactgtttggcttccaatcactagtacagcgagagtgggtggcagctggacatcccttcctgactcggcttgggggaactggggccagtgaagaggctccggtgtttctcctcttccttgattgtgtctggcagctcctccagcagtttccagctgattttgaattctctgagtttttccttcttgctcttcatgacagtgtcagggttcctgacacccttaccttcctgagaaataccccctgggagcgcggaaagcagagcggacagttaaactcctatacacaagtctacaccccaggatactcccagcctccagctgggaactcttttaacctgcagctgtctgtctgggactgggatttacgttatagcaatgcacagatactacaattccagaatcctggctatgacccagaacactgtccagattcctggctccctagaccacagccaagcttcatggttcctggaccccccagttctgtgtggctcttctctagaggagcattgacccccctgaatcagctctgtccttggcgggacagtccttccctgctggcagtctcttctcgttggctccctcgacctgctatctcctctgaaagcctggctgaccaggaatggggtctcccctcacattggggagcttgccctttacctccagggctgctgctgcctgggtatctgggaccccagatcaggctctggagacgctgctacctgaggggaaggcctgaggtccagatgggcctctcagctcccacaatctctggcctccaggatgagctatcccatcttcaggagttattacggaaatggacaccaagaatatctcctgaggatcactccaagaaaagagatccacataccattctcaatcccactgaaattgctggcattctcaaaggccaatcccatcccttctggataaccagatgttaaatcatgagatcagagatgctgttcatcagtcccaacaagatggcctagaaatcgcattctcacctcgccttgctgctgctttaattccaagttctatttcttcccttatagttttctatgggaatgaggcggatacaggaaacaccctatctcctctgtatttttgtagtggaatttctatttaaggggctcattaaagcatagtatttatacac

SEQ ID NO: 410 - DNA, 9797 bp, Homo sapiens
agctgcctcacccccggccccgggaagggcatggccccggcaaactcccggccgtgactcgcgcgccccggctcggtggatgctcccggcgcaccgctcccgtgtgcggcggcttcccaaggacaggtatccgagaatcaggcaccccgacaagatgcccaagcgcgcgcactggggggccctctccgtggtgctgatcctgctttggggccatccgcgagtggcgctggcctgcccgcatccttgtgcctgctacgtccccagcgaggtccactgcacgttccgatccctggcttccgtgcccgctggcattgctaaacacgtggaaagaatcaatttggggtttaatagcatacaggccctgtcagaaacctcatttgcaggactgaccaagttggagctacttatgattcacggcaatgagatcccaagcatccccgatggagctttaagagacctcagctctcttcaggttttcaagttcagctacaacaagctgagagtgatcacaggacagaccctccagggtctctctaacttaatgaggctgcacattgaccacaacaagatcgagtttatccaccctcaagctttcaacggcttaacgtctctgaggctactccatttggaaggaaatctcctccaccagctgcaccccagcaccttctccacgttcacatttttggattatttcagactctccaccataaggcacctctacttagcagagaacatggttagaactcttcctgccagcatgcttcggaacatgccgcttctggagaatctttacttgcagggaaatccgtggacctgcgattgtgagatgagatggtttttggaatgggatgcaaaatccagaggaattctgaagtgtaaaaaggacaaagcttatgaaggcggtcagttgtgtgcaatgtgcttcagtccaaagaagttgtacaaacatgagatacacaagctgaaggacatgacttgtctgaagccttcaatagagtcccctctgagacagaacaggagcaggagtattgaggaggagcaagaacaggaagaggatggtggcagccagctcatcctggagaaattccaactgccccagtggagcatctctttgaatatgaccgacgagcacgggaacatggtgaacttggtctgtgacatcaagaaaccaatggatgtgtacaagattcacttgaaccaaacggatcctccagatattgacataaatgcaacagttgccttggactttgagtgtccaatgacccgagaaaactatgaaaagctatggaaattgatagcatactacagtgaagttcccgtgaagctacacagagagctcatgctcagcaaagaccccagagtcagctaccagtacaggcaggatgctgatgaggaagctctttactacacaggtgtgagagcccagattcttgcagaaccagaatgggtcatgcagccatccatagatatccagctgaaccgacgtcagagtacggccaagaaggtgctactttcctactacacccagtattctcaaacaatatccaccaaagatacaaggcaggctcggggcagaagctgggtaatgattgagcctagtggagctgtgcaaagagatcagactgtcctggaagggggtccatgccagttgagctgcaacgtgaaagcttctgagagtccatctatcttctgggtgcttccagatggctccatcctgaaagcgcccatggatgacccagacagcaagttctccattctcagcagtggctggctgaggatcaagtccatggagccatctgactcaggcttgtaccagtgcattgctcaagtgagggatgaaatggaccgcatggtatatagggtacttgtgcagtctccctccactcagccagccgagaaagacacagtgacaattggcaagaacccaggggagtcggtgacattgccttgcaatgctttagcaatacccgaagcccaccttagctggattcttccaaacagaaggataattaatgatttggctaacacatcacatgtatacatgttgccaaatggaactctttccatcccaaaggtccaagtcagtgacagtggttactacagatgtgtggctgtcaaccagcaaggggcagaccattttacggtgggaatcacagtgaccaagaaagggtctggcttgccatccaaaagaggcagacgcccaggtgcaaaggctctttccagagtcagagaagacatcgtggaggatgaagggggctcgggcatgggagatgaagagaacacttcaaggagacttctgcatccaaaggaccaagaggtgttcctcaaaacaaaggatgatgccatcaatggagacaagaaagccaagaaagggagaagaaagctgaaactctggaagcattcggaaaaagaaccagagaccaatgttgcagaaggtcgcagagtgtttgaatctagacgaaggataaacatggcaaacaaacagattaatccggagcgctgggctgatattttagccaaagtccgtgggaaaaatctccctaagggcacagaagtacccccattgattaaaaccacaagtcctccatccttgagtctagaagtcacaccaccttttcctgctatttctcccccctcagcatctcctgtgcagacagtaaccagtgctgaagaatcctcagcagatgtacctctacttggtgaagaagagcacgttttgggtaccatttcctcagccagcatggggctagaacacaaccacaatggagttattcttgttgaacctgaagtaacaagcacacctctggaggaagttgttgatgacctttccgagaagactgaggagataacttccactgaaggagacctgaaggggacagcagcccctacacttatatctgagccttatgaaccatctcctactctgcacacattagacacagtctatgaaaagcccacccatgaagagacggcaacagagggttggtctgcagcagatgttggatcgtcaccagagcccacatccagtgagtatgagcctccattggatgctgtctccttggctgagtctgagcccatgcaatactttgacccagatttggagactaagtcacaaccagatgaggataagatgaaagaagacacctttgcacaccttactccaacccccaccatctgggttaatgactccagtacatcacagttatttgaggattctactataggggaaccaggtgtcccaggccaatcacatctacaaggactgacagacaacatccaccttgtgaaaagtagtctaagcactcaagacaccttactgattaaaaagggtatgaaagagatgtctcagacactacagggaggaaatatgctagagggagaccccacacactccagaagttctgagagtgagggccaagagagcaaatccatcactttgcctgactccacactgggtataatgagcagtatgtctccagttaagaagcctgcggaaaccacagttggtaccctcctagacaaagacaccacaacagcaacaacaacaccaaggcaaaaagttgctccgtcatccaccatgagcactcacccttctcgaaggagacccaacgggagaaggagattacgccccaacaaattccgccaccggcacaagcaaaccccacccacaacttttgccccatcagagactttttctactcaaccaactcaagcacctgacattaagatttcaagtcaagtggagagttctctggttcctacagcttgggtggataacacagttaatacccccaaacagttggaaatggagaagaatgcagaacccacatccaagggaacaccacggagaaaacacgggaagaggccaaacaaacatcgatataccccttctacagtgagctcaagagcgtccggatccaagcccagcccttctccagaaaataaacatagaaacattgttactcccagttcagaaactatacttttgcctagaactgtttctctgaaaactgagggcccttatgattccttagattacatgacaaccaccagaaaaatatattcatcttaccctaaagtccaagagacacttccagtcacatataaacccacatcagatggaaaagaaattaaggatgatgttgccacaaatgttgacaaacataaaagtgacattttagtcactggtgaatcaattactaatgccataccaacttctcgctccttggtctccactatgggagaatttaaggaagaatcctctcctgtaggctttccaggaactccaacctggaatccctcaaggacggcccagcctgggaggctacagacaggcatacctgttaccacttctggggaaaatcttacagaccctccccttcttaaagagcttgaggatgtggatttcacttccgagtttttgtcctctttgacagtctccacaccatttcaccaggaagaagctggttcttccacaactctctcaagcataaaagtggaggtggcttcaagtcaggcagaaaccaccacccttgatcaagatcatcttgaaaccactgtggctattctcctttctgaaactagaccacagaatcacacccctactgctgcccggatgaaggagccagcatcctcgtccccatccacaattctcatgtctttgggacaaaccaccaccactaagccagcacttcccagtccaagaatatctcaagcatctagagattccaaggaaaatgttttcttgaattatgtggggaatccagaaacagaagcaaccccagtgaacaatgaaggaacacagcatatgtcagggccaaatgaattatcaacaccctcttccgaccaggatgcatttaacttgtctacaaagctggaattggaaaagcaagtatttggtagtaggagtctaccacgtggcccagatagccaacgccaggatggaagagttcatgcttctcatcaactaaccagagtccctgccaaacccatcctaccaacagcaacagtgaggctgcctgaaatgtccacacaaagcgcttccagatactttgtaacttcccagtcacctcgtcactggaccaacaaaccggaaataactacatatccttctggggctttgccagagaacaaacagtttacaactccaagattatcaagtacaacaattcctctcccattgcacatgtccaaacccagcattcctagtaagtttactgaccgaagaactgaccaattcaatggctactccaaagtgtttggaaataacaacatccctgaggcaagaaacccagttggaaagcctcccagtccaagaattcctcattattccaatggaagactccctttctttaccaacaagactctttcttttccacagttgggagtcacccggagaccccagatacccacttctcctgccccagtaatgagagagagaaaagttattccaggttcctacaacaggatacattcccatagcaccttccatctggactttggccctccggcacctccgttgttgcacactccgcagaccacgggatcaccctcaactaacttacagaatatccctatggtctcttccacccagagttctatctcctttataacatcttctgtccagtcctcaggaagcttccaccagagcagctcaaagttctttgcaggaggacctcctgcatccaaattctggtctcttggggaaaagccacaaatcctcaccaagtccccacagactgtgtccgtcaccgctgagacagacactgtgttcccctgtgaggcaacaggaaaaccaaagcctttcgttacttggacaaaggtttccacaggagctcttatgactccgaataccaggatacaacggtttgaggttctcaagaacggtaccttagtgatacggaaggttcaagtacaagatcgaggccagtatatgtgcaccgccagcaacctgcacggcctggacaggatggtggtcttgctttcggtcaccgtgcagcaacctcaaatcctagcctcccactaccaggacgtcactgtctacctgggagacaccattgcaatggagtgtctggccaaagggaccccagccccccaaatttcctggatcttccctgacaggagggtgtggcaaactgtgtcccccgtggagggccgcatcaccctgcacgaaaaccggaccctttccatcaaggaggcgtccttctcagacagaggcgtctataagtgcgtggccagcaatgcagccggggcggacagcctggccatccgcctgcacgtggcggcactgccccccgttatccaccaggagaagctggagaacatctcgctgcccccggggctcagcattcacattcactgcactgccaaggctgcgcccctgcccagcgtgcgctgggtgctcggggacggtacccagatccgcccctcgcagttcctccacgggaacttgtttgttttccccaacgggacgctctacatccgcaacctcgcgcccaaggacagcgggcgctatgagtgcgtggccgccaacctggtaggctccgcgcgcaggacggtgcagctgaacgtgcagcgtgcagcagccaacgcgcgcatcacgggcacctccccgcggaggacggacgtcaggtacggaggaaccctcaagctggactgcagcgcctcgggggacccctggccgcgcatcctctggaggctgccgtccaagaggatgatcgacgcgctcttcagttttgatagcagaatcaaggtgtttgccaatgggaccctggtggtgaaatcagtgacggacaaagatgccggagattacctgtgcgtagctcgaaataaggttggtgatgactacgtggtgctcaaagtggatgtggtgatgaaaccggccaagattgaacacaaggaggagaacgaccacaaagtcttctacgggggtgacctgaaagtggactgtgtggccaccgggcttcccaatcccgagatctcctggagcctcccagacgggagtctggtgaactccttcatgcagtcggatgacagcggtggacgcaccaagcgctatgtcgtcttcaacaatgggacactctactttaacgaagtggggatgagggaggaaggagactacacctgctttgctgaaaatcaggtcgggaaggacgagatgagagtcagagtcaaggtggtgacagcgcccgccaccatccggaacaagacttacttggcggttcaggtgccctatggagacgtggtcactgtagcctgtgaggccaaaggagaacccatgcccaaggtgacttggttgtccccaaccaacaaggtgatccccacctcctctgagaagtatcagatataccaagatggcactctccttattcagaaagcccagcgttctgacagcggcaactacacctgcttggtcaggaacagcgcgggagaggataggaagacggtgtggattcacgtcaacgtccagccacccaagatcaacggtaaccccaaccccatcaccactgtgcgggagatagcagccgggggcagtcggaaactgattgactgcaaagctgaaggcatccccaccccgagggtgttatgggcttttcccgagggtgtggttctgccagctccatactatggaaaccggatcactgtccatggcaacggttccctggacatcaggagtttgaggaagagcgactccgtccagctggtatgcatggcacgcaacgagggaggggaggccaggttgatcctgcagctcactgtcctggagcccatggagaaacccatcttccacgacccgatcagcgagaagatcacggccatggcgggccacaccatcagcctcaactgctctgccgcggggaccccgacacccagcctggtgtgggtccttcccaatggcaccgatctgcagagtggacagcagctgcagcgcttctaccacaaggctgacggcatgctacacattagcggtctctcctcggtggacgccggggcctaccgctgcgtggcccgcaatgccgctggccacacggagaggctggtctccctgaaggtgggactgaagccagaagcaaacaagcagtatcataacctggtcagcatcatcaatggtgagaccctgaagctcccctgcacccctcccggggctgggcagggacgtttctcctggacgctccccaatggcatgcatctggagggcccccaaaccctgggacgcgtttctcttctggacaatggcaccctcacggttcgtgaggcctcggtgtttgacaggggtacctatgtatgcaggatggagacggagtacggcccttcggtcaccagcatccccgtgattgtgatcgcctatcctccccggatcaccagcgagcccaccccggtcatctacacccggcccgggaacaccgtgaaactgaactgcatggctatggggattcccaaagctgacatcacgtgggagttaccggataagtcgcatctgaaggcaggggttcaggctcgtctgtatggaaacagatttcttcacccccagggatcactgaccatccagcatgccacacagagagatgccggcttctacaagtgcatggcaaaaaacattctcggcagtgactccaaaacaacttacatccacgtcttctgaaatgtggattccagaatgattgcttaggaactgacaacaaagcggggtttgtaagggaagccaggttggggaataggagctcttaaataatgtgtcacagtgcatggtggcctctggtgggtttcaagttgaggttgatcttgatctacaattgttgggaaaaggaagcaatgcagacacgagaaggagggctcagccttgctgagacactttcttttgtgtttacatcatgccaggggcttcattcagggtgtctgtgctctgactgcaatttttctttttttgcaaatgccactcgactgccttcataagcgtccataggatatctgaggaacattcatcaaaaataagccatagacatgaacaacacctcactaccccattgaagacgcatcacctagttaacctgctgcagtttttacatgatagactttgttccagattgacaagtcatctttcagttatttcctctgtcacttcaaaactccagcttgcccaataaggatttagaaccagagtgactgatatatatatatattttaattcagagttacatacatacagctaccattttatatgaaaaaagaaaaacatttcttcctggaactcactttttatataatgttttatatatatattttttcctttcaaatcagacgatgagactagaaggagaaatactttctgtcttattaaaattaataaattattggtctttacaagacttggatacattacagcagacatggaaatataattttaaaaaatttctctccaacctccttcaaattcagtcaccactgttatattaccttctccaggaaccctccagtggggaaggctgcgatattagatttccttgtatgcaaagtttttgttgaaagctgtgctcagaggaggtgagaggagaggaaggagaaaactgcatcataactttacagaattgaatctagagtcttccccgaaaagcccagaaacttctctgcagtatctggcttgtccatctggtctaaggtggctgcttcttccccagccatgagtcagtttgtgcccatgaataatacacgacctgttatttccatgactgctttactgtatttttaaggtcaatatactgtacatttgataataaaataatattctcccaaaaaaaaaa

SEQ ID NO: 411 - DNA, 2898 bp, Homo sapiens
cattcgccggaggctggaggaggctgacccgcgtccccgcccagcctgctcctatgcggtacttgaaggatggcgaagaggtcgcgcagtgaggatgaggatgatgaccttcagtatgccgatcatgattatgaagtaccacaacaaaaaggactgaagaaactctggaacagagtaaaatggacaagggacgaggatgataaattaaagaagttggttgaacaacatggaactgatgattggactctaattgctagtcatcttcaaaatcgctctgattttcagtgccagcatcgatggcagaaagttttaaatcctgaattgataaagggtccttggactaaagaagaagatcagagggttattgaattagttcagaaatatgggccaaaaagatggtctttaattgcaaaacatttaaaaggaagaataggcaagcagtgtagagaaagatggcataatcatctgaatcctgaggtaaagaaatcttcctggacagaagaggaggacaggatcatctatgaagcacataagcggttgggaaatcgttgggcagaaattgccaaactacttccaggaaggactgataattctatcaaaaatcattggaattctactatgcgaagaaaagtggaacaggagggctatttacaagatggaataaaatcagaacgatcttcatctaaacttcaacacaaaccttgtgcagctatggatcatatgcaaacccagaatcagttttacatacctgttcagatccctgggtatcagtatgtgtcacctgaaggcaattgtatagaacatgttcagcctacttctgcctttattcagcaacccttcattgatgaagatcctgataaggaaaagaaaataaaggaacttgagatgcttcttatgtcagctgagaatgaagttagaagaaagcgaattccatcacagcctggaagtttttctagctggtctggtagtttcctcatggatgataacatgtctaatactctaaatagccttgacgagcacactagtgagttttacagtatggatgaaaatcagcctgtgtctgctcagcagaattcacccacaaagttcctggccgtggaggcaaacgctgtgttatcctctttgcagaccatcccagaatttgcagagactctagaacttattgaatctgatcctgtagcatggagtgacgttaccagttttgatatttctgatgctgctgcttctcctatcaaatccaccccagttaaattaatgagaattcagcacaatgaaggagccatggaatgccaatttaacgtcagtcttgtacttgaagggaaaaaaaacacttgtaatggtggcaacagtgaagctgttcctttaacatccccaaatatagccaagtttagcactccaccagccatcctcagaaagaagagaaaaatgcgagtgggtcattccccaggcagcgaacttagggatggctcattgaacgatggtggtaatatggcgctaaaacatacaccactgaaaacactaccattttctccttcacagtttttcaacacatgtcctggtaatgaacaacttaatatagaaaatccttcatttacatcaacccctatttgtgggcagaaagctctcattacaactcctcttcataaggaaacaactcccaaagatcaaaaggaaaatgtagggtttagaacacctactattagaagatctatactgggtaccacaccaagaactcctactccttttaagaatgcgcttgctgctcaggagaaaaaatatggacctcttaaaattgtgtcccagccacttgctttcttggaagaagatattcgggaagttttaaaagaagaaactggaacagacctattcctcaaagaggaagatgaacctgcttacaaaagctgcaaacaagagaataccgcttctgggaagaaagtcagaaaatcactagtcttagataattgggaaaaagaagaatcaggcactcaactgttgactgaagacatttcagacatgcagtcaaattgtgaatgggaaacagtggtttatgggaagacagaagaccaacttattatgactgaacaagcaagaagatatctgagtacttacacagctaccagtagtacttcaagagctctcatactgtaattgttattaaaattgatgaaatgccccactcccttactgcagtctctactaaattaggttgcagtgaaatttttctcaattagttgtttttaaagttgtaagatagcccttttaatacagcatcttttttctattctatatagtaggcagaaagctagtaagtcacttaaggggtagatagtttcatagtttattttttaagagatgagatttttaaaaattgtttttaaagaacaagatgggaaaataatagaatgttcatggatttctaaaagtaaattctcatatattttcttcacaagatatatgttgctactctcttgatgctgcagttttgttatagataggtgtatgagtatatatgatttctgaaattagtctatgtatggaaagcacacatgattttatgaagtacttttgcccatgtgctgatttacttaggctaccatttacaaagaaacacattgaaaaggaatttaaaggaaggatagaaagttgcactactaattttttgttttttttttcagaagcagtaaaattaactacagtgttaaatgtatttatttgagcatagtactgaaaacaaaaagcattcaaaaaagagttttttctttattagtaaatagtattttcttaatctcagaggagctgagagttttgttgaatgtattgtacagtatgtaggagcaggagaactttgtaaattggaaagaagtctgtttttataatttatttttatttttaaagctt

SEQ ID NO: 412 - DNA, 4879 bp, Homo sapiens
gagggaagcggctagaggatcggggagaaggagcattcgccggaggctggaggaggctgacccgcgtccccgcccagcctgctcctatgcggtacttgaaggatggcgaagaggtcgcgcagtgaggatgaggatgatgaccttcagtatgccgatcatgattatgaagtaccacaacaaaaaggactgaagaaactctggaacagagtaaaatggacaagggacgaggatgataaattaaagaagttggttgaacaacatggaactgatgattggactctaattgctagtcatcttcaaaatcgctctgattttcagtgccagcatcgatggcagaaagttttaaatcctgaattgataaagggtccttggactaaagaagaagatcagagggttattgaattagttcagaaatatgggccaaaaagatggtctttaattgcaaaacatttaaaaggaagaataggcaagcagtgtagagaaagatggcataatcatctgaatcctgaggtaaagaaatcttcctggacagaagaggaggacaggatcatctatgaagcacataagcggttgggaaatcgttgggcagaaattgccaaactacttccaggaaggactgataattctatcaaaaatcattggaattctactatgcgaagaaaagtggaacaggagggctatttacaagatggaataaaatcagaacgatcttcatctaaacttcaacacaaaccttgtgcagctatggatcatatgcaaacccagaatcagttttacatacctgttcagatccctgggtatcagtatgtgtcacctgaaggcaattgtatagaacatgttcagcctacttctgcctttattcagcaacccttcattgatgaagatcctgataaggaaaagaaaataaaggaacttgagatgcttcttatgtcagctgagaatgaagttagaagaaagcgaattccatcacagcctggaagtttttctagctggtctggtagtttcctcatggatgataacatgtctaatactctaaatagccttgacgagcacactagtgagttttacagtatggatgaaaatcagcctgtgtctgctcagcagaattcacccacaaagttcctggccgtggaggcaaacgctgtgttatcctctttgcagaccatcccagaatttgcagagactctagaacttattgaatctgatcctgtagcatggagtgacgttaccagttttgatatttctgatgctgctgcttctcctatcaaatccaccccagttaaattaatgagaattcagcacaatgaaggagccatggaatgccaatttaacgtcagtcttgtacttgaagggaaaaaaaacacttgtaatggtggcaacagtgaagctgttcctttaacatccccaaatatagccaagtttagcactccaccagccatcctcagaaagaagagaaaaatgcgagtgggtcattccccaggcagcgaacttagggatggctcattgaacgatggtggtaatatggcgctaaaacatacaccactgaaaacactaccattttctccttcacagtttttcaacacatgtcctggtaatgaacaacttaatatagaaaatccttcatttacatcaacccctatttgtgggcagaaagctctcattacaactcctcttcataaggaaacaactcccaaagatcaaaaggaaaatgtagggtttagaacacctactattagaagatctatactgggtaccacaccaagaactcctactccttttaagaatgcgcttgctgctcaggagaaaaaatatggacctcttaaaattgtgtcccagccacttgctttcttggaagaagatattcgggaagttttaaaagaagaaactggaacagacctattcctcaaagaggaagatgaacctgcttacaaaagctgcaaacaagagaataccgcttctgggaagaaagtcagaaaatcactagtcttagataattgggaaaaagaagaatcaggcactcaactgttgactgaagacatttcagacatgcagtcagaaaatagatttactacatccttattaatgataccattattggaaatacatgacaataggtgcaacttgattcctgaaaaacaagatataaattcaaccaacaaaacatatacacttactaaaaagaaaccaaaccctaacacttccaaagttgtcaaattggaaaagaatcttcagtcaaattgtgaatgggaaacagtggtttatgggaagacagaagaccaacttattatgactgaacaagcaagaagatatctgagtacttacacagctaccagtagtacttcaagagctctcatactgtaattgttattaaaattgatgaaatgccccactcccttactgcagtctctactaaattaggttgcagtgaaatttttctcaattagttgtttttaaagttgtaagatagcccttttaatacagcatcttttttctattctatatagtaggcagaaagctagtaagtcacttaaggggtagatagtttcatagtttattttttaagagatgagatttttaaaaattgtttttaaagaacaagatgggaaaataatagaatgttcatggatttctaaaagtaaattctcatatattttcttcacaagatatatgttgctactctcttgatgctgcagttttgttatagataggtgtatgagtatatatgatttctgaaattagtctatgtatggaaagcacacatgattttatgaagtacttttgcccatgtgctgatttacttaggctaccatttacaaagaaacacattgaaaaggaatttaaaggaaggatagaaagttgcactactaattttttgttttttttttcagaagcagtaaaattaactacagtgttaaatgtatttatttgagcatagtactgaaaacaaaaagcattcaaaaaagagttttttctttattagtaaatagtattttcttaatctcagaggagctgagagttttgttgaatgtattgtacagtatgtaggagcaggagaactttgtaaattggaaagaagtctgtttttataatttatttttatttttaaagcttaaatgtagatatttatacgtatacagggtgcctagaagccaatgttgtttcctgttattacagctaacacagtaaagaataattttgactttaagtatgaaacagtagtaagttatagctgcaaagaatacaatatctatactgtatgtcacatctacctaaatgttgcactatgccctttaaatcatgctggttataaagtagttctaaaaatgtactaaataataatttaatattttctttttaaattatatcgggggtggtcatatacattaatctggtgatttgtatatgtgtttgaaatttttgcattttgtttaaaaaataatatggtaccttggtccctaaaaacagtctgcacttagaagtttatatttactcagtgtttcagaagtggagaacattatcttttatttataaaaatattttgtccttttttaaatgttttgtgtttctctacaggttacaacagttgcttcagttgcctgttttaggtgtttgcacttattttatttcttcttgaaagaatttttatttgcttttgtggtagagattatatgtaattttttttcagtcatataatggtgtgctgtcaacttaaacactgacaggtaaatagaattgtacactgtagtttgaattatttataattgacacactctctccctctccactcctgaagtatgctgctatagaaaatagcagaatcggcttgctgctacgagagaaggaaagagcgaccaccacttgcactgtgtgaaaagataaaaaacaaatgatggcaagttctcaagttaactaaatggaatcaaccattaccaggcaaattcttgcaaataccaaaatactactatgccttataaaacaaaatgaaagcaggttaagattttctgctctgtttgtatgttaatagaaatggaaatactaagtattttaatgcttagctcttgaacagtagacctaaaagggttttaagctatttaaatctacttgctagtttttgcatattttatatatatatatatttatatatatatatagtgagaagtgaagaaaatgtatggtactaagattatgccttattgataaatagataaaccaatttgaatcctcttagcatgtttaagtatgttgattgctttctaattaatgaacttctcacagaaatttcacttagtgaaaccaatgattgtagcaaactcatactggatcatttcagttaccttgaactaatagcacataatggttttttgttgttgttgtttttaatgtagcccttacctggatatacatagtctgcaatcaccaaagtataatatcttgtaaggctatattttttaaagcatattttttcttgagcattaaattatcctaaatggtaatatattgtggataagtctgggcttattggacataatacatatttgggttggtactggttgaatccttcagttaactgctttgttgctttttgcaagattttttatcttaaacatgtcaggcatcttaagtcacctttatactgttttgttcctctgagtttctttcagtatgttatacaaatgccagacataacatgtagcagccatacttgcatggaaactgactacacatacataatactgcattttattgtaaggttttcacattaatacagcaattaccctgactaaattgagttttgtgatatatggaaaacttcattgtaagagaatcttgcatacaatgttgacatattaacatccaaaataaagcatctgtgtacaag

SEQ ID NO: 413 - DNA, 7619 bp, Homo sapiens
actgaggcgctggatctgtggtcgcggctggggacgtgcgcccgcgccaccatcttcggctgaagaggcaattgcttttggatcgttccatttacaatggcgcagagaactggactcgaggatccagagaggtatctctttgtggacagggctgtcatctacaaccctgccactcaagctgattggacagctaaaaagctagtgtggattccatcagaacgccatggttttgaggcagctagtatcaaagaagaacggggagatgaagttatggtggagttggcagagaatggaaagaaagcaatggtcaacaaagatgatattcagaagatgaacccacctaagttttccaaggtggaggatatggcagaattgacatgcttgaatgaagcttccgttttacataatctgaaggatcgctactattcaggactaatctatacttattctggactcttctgtgtagttataaacccttacaagaatcttccaatttactctgagaatattattgaaatgtacagagggaagaagcgtcatgagatgcctccacacatctatgctatatctgaatctgcttacagatgcatgcttcaagatcgtgaggaccagtcaattctttgcacgggtgagtcaggtgctgggaagacagaaaatacaaagaaagttattcagtaccttgcccatgttgcttcttcacataaaggaagaaaggaccataatattcctggggaacttgaacggcagcttttgcaagcaaatccaattctggaatcatttggaaatgcgaagactgtgaaaaatgataactcatctcgttttggcaaatttattcggatcaactttgatgtaactggctatatcgttggggccaacattgaaacataccttctggaaaagtctcgtgctgttcgtcaagcaaaagatgaacgtacttttcatatcttttaccagttgttatctggagcaggagaacacctaaagtctgatttgcttcttgaaggatttaataactacaggtttctctccaatggctatattcctattccgggacagcaagacaaagataatttccaggagaccatggaagcaatgcacataatgggcttctcccatgaagagattctgtcaatgcttaaagtagtatcttcagtgctacagtttggaaatatttctttcaaaaaggagagaaatactgatcaagcttccatgccagaaaatacagttgcgcagaagctctgccatcttcttgggatgaatgtgatggagtttactcgggccatcctgactccccggatcaaggtcggccgagactatgtgcaaaaagcccagaccaaagaacaggcagattttgcagtagaagcattggcaaaagctacctatgagcggctctttcgctggctcgttcatcgcatcaataaagctctggataggaccaaacgtcagggagcatctttcattggaatcctggatattgctggatttgaaatttttgagctgaactcctttgaacaactttgcatcaactacaccaatgagaagctgcagcagctgttcaaccacaccatgtttatcctagaacaagaggaataccagcgcgaaggcatcgagtggaacttcatcgatttcgggctggatctgcagccatgcatcgacctaatagagagacctgcgaaccctcctggtgtactggcccttttggatgaagaatgctggttccctaaagccacagataaaacctttgttgaaaaactggttcaagagcaaggttcccactccaagtttcagaaacctcgacaattaaaagacaaagctgatttttgcattatacattatgcagggaaggtggactataaggcagatgagtggctgatgaagaatatggaccccctgaatgacaacgtggccacccttttgcaccagtcatcagacagatttgtggcagagctttggaaagatgtggaccgtatcgtgggtctggatcaagtcactggtatgactgagacagcttttggctccgcatataaaaccaagaagggcatgtttcgtaccgttgggcaactctacaaagaatctctcaccaagctgatggcaactctccgaaacaccaaccctaactttgttcgttgtatcattccaaatcacgagaagagggctggaaaattggatccacacctagtcctagatcagcttcgctgtaatggtgtcctggaagggatccgaatctgtcgccagggcttccctaaccgaatagttttccaggaattcagacagagatatgagatcctaactccaaatgctattcctaaaggttttatggatggtaaacaggcctgtgaacgaatgatccgggctttagaattggacccaaacttgtacagaattggacagagcaagatatttttcagagctggagttctggcacacttagaggaagaaagagatttaaaaatcaccgatatcattatcttcttccaggccgtttgcagaggttacctggccagaaaggcctttgccaagaagcagcagcaactaagtgccttaaaggtcttgcagcggaactgtgccgcgtacctgaaattacggcactggcagtggtggcgagtcttcacaaaggtgaagccgcttctacaagtgactcgccaggaggaagaacttcaggccaaagatgaagagctgttgaaggtgaaggagaagcagacgaaggtggaaggagagctggaggagatggagcggaagcaccagcagcttttagaagagaagaatatccttgcagaacaactacaagcagagactgagctctttgctgaagcagaagagatgagggcaagacttgctgctaaaaagcaggaattagaagagattctacatgacttggagtctagggttgaagaagaagaagaaagaaaccaaatcctccaaaatgaaaagaaaaaaatgcaagcacatattcaggacctggaagaacagctagacgaggaggaaggggctcggcaaaagctgcagctggaaaaggtgacagcagaggccaagatcaagaagatggaagaggagattctgcttctcgaggaccaaaattccaagttcatcaaagaaaagaaactcatggaagatcgcattgctgagtgttcctctcagctggctgaagaggaagaaaaggcgaaaaacttggccaaaatcaggaataagcaagaagtgatgatctcagatttagaagaacgcttaaagaaggaagaaaagactcgtcaggaactggaaaaggccaaaagaaaactcgacggggagacgaccgacctgcaggaccagatcgcagagctgcaggcgcagattgatgagctcaagctgcagctggccaagaaggaggaggagctgcagggcgcactggccagaggtgatgatgaaacactccataagaacaatgcccttaaagttgtgcgagagctacaagcccaaattgctgaacttcaggaagactttgaatccgagaaggcttcacggaacaaggccgaaaagcagaaaagggacttgagtgaggaactggaagctctgaaaacagagctggaggacacgctggacaccacggcagcccagcaggaactacgtacaaaacgtgaacaagaagtggcagagctgaagaaagctcttgaggaggaaactaagaaccatgaagctcaaatccaggacatgagacaaagacacgcaacagccctggaggagctctcagagcagctggaacaggccaagcggttcaaagcaaatctagagaagaacaagcagggcctggagacagataacaaggagctggcgtgtgaggtgaaggtcctgcagcaggtcaaggctgagtctgagcacaagaggaagaagctcgacgcgcaggtccaggagctccatgccaaggtctctgaaggcgacaggctcagggtggagctggcggagaaagcaagtaagctgcagaatgagctagataatgtctccacccttctggaagaagcagagaagaagggtattaaatttgctaaggatgcagctagtcttgagtctcaactacaggatacacaggagcttcttcaggaggagacacgccagaaactaaacctgagcagtcggatccggcagctggaagaggagaagaacagtcttcaggagcagcaggaggaggaggaggaggccaggaagaacctggagaagcaagtgctggccctgcagtcccagttggctgataccaagaagaaagtagatgacgacctgggaacaattgaaagtctggaagaagccaagaagaagcttctgaaggacgcggaggccctgagccagcgcctggaggagaaggcactggcgtatgacaaactggagaagaccaagaaccgcctgcagcaggagctggacgacctcacggtggacctggaccaccagcgccaggtcgcctccaacttggagaagaagcagaagaagtttgaccagctgttagcagaagagaagagcatctctgctcgctatgccgaagagcgggaccgggccgaagccgaggccagagagaaagaaaccaaagccctgtcactggcccgggccctcgaggaagccctggaggccaaggaggagtttgagaggcagaacaagcagctccgagcagacatggaagacctcatgagctccaaagatgatgtgggaaaaaacgttcacgaacttgaaaaatccaaacgggccctagagcagcaggtggaggaaatgaggacccagctggaggagctggaagacgaactccaggccacggaagatgccaagcttcgtctggaggtcaacatgcaggccatgaaggcgcagttcgagagagacctgcaaaccagggatgagcagaatgaagagaagaagcggctgctgatcaaacaggtgcgggagctcgaggcggagctggaggatgagaggaaacagcgggcgcttgctgtagcttcaaagaaaaagatggagatagacctgaaggacctcgaagcccaaatcgaggctgcgaacaaagctcgggatgaggtgattaagcagctccgcaagctccaggctcagatgaaggattaccaacgtgaattagaagaagctcgtgcatccagagatgagatttttgctcaatccaaagagagtgaaaagaaattgaagagtctggaagcagaaatccttcaattgcaggaggaacttgcctcatctgagcgagcccgccgacacgccgagcaggagagagatgagctggcggacgagatcaccaacagcgcctctggcaagtccgcgctgctggatgagaagcggcgtctggaagctcggatcgcacagctggaggaggagctggaagaggagcagagcaacatggagctgctcaacgaccgcttccgcaagaccactctacaggtggacacactgaacgccgagctagcagccgagcgcagcgccgcccagaagagtgacaatgcacgccagcaactggagcggcagaacaaggagctgaaggccaagctgcaggaactcgagggtgctgtcaagtctaagttcaaggccaccatctcagccctggaggccaagattgggcagctggaggagcagcttgagcaggaagccaaggaacgagcagccgccaacaaattagtccgtcgcactgagaagaagctgaaagaaatcttcatgcaggttgaggatgagcgtcgacacgcggaccagtataaagagcagatggagaaggccaacgctcggatgaagcagcttaaacgccagctggaggaagcagaagaagaagcgacgcgtgccaacgcatctcggcgtaaactccagcgggaactggatgatgccaccgaggccaacgagggcctgagccgcgaggtcagcaccctgaagaaccggctgaggcggggtggccccatcagcttctcttccagccgatctggccggcgccagctgcaccttgaaggagcttccctggagctctccgacgatgacacagaaagtaagaccagtgatgtcaacgagacgcagccaccccagtcagagtaaagttgcaggaagccagaggaggcaatacagtgggacagttaggaatgcacccggggcctcctgcagatttcggaaattggcaagctacgggattccttcctgaaagatcaactgtgtcttaaggctctccagcctatgcatactgtatcctgcttcagacttaggtacaattgctcccctttttatatatagacacacacaggacacatatattaaacagattgtttcatcattgcatctattttccatatagtcatcaagagaccattttataaaacatggtaagaccctttttaaaacaaactccaggcccttggttgcgggtcgctgggttattggggcagcgccgtggtcgtcactcagtcgctctgcatgctctctgtcatacagacaggtaacctagttctgtgttcacgtggcccccgactcctcagccacatcaagtctcctagaccactgtggactctaaactgcacttgtctctctcatttccttcaaataatgatcaatgctatttcagtgagcaaactgtgaaaggggctttggaaagagtaggaggggtgggctggatcggaagcaacacccatttggggttaccatgtccatcccccaaggggggccctgcccctcgagtcgatggtgtcccgcatctactcatgtgaactggccttggcgagggctggtctgtgcatagaagggatagtggccacactgcagctgaggccccaggtggcagccatggatcatgtagacttccagatggtctcccgaaccgcctggctctgccggcgccctcctcacgtcaggagcaagcagccgtggacccctaagccgagctggtggaaggcccctccctgtcgccagccgggccctcatgctgaccttgcaaattcagccgctgctttgagcccaaaatgggaatattggttttgtgtccgaggcttgttccaagtttgtcaatgaggtttatggagcctccagaacagatgccatcttcctgaatgttgacatgccagtgggtgtgactccttcatttttccttctcccttccctttggacagtgttacagtgaacacttagcatcctgtttttggttggtagttaagcaaactgacattacggaaagtgccttagacactacagtactaagacaatgttgaatatatcattcgcctctataacaatttaatgtattcagttttgactgtgcttcatatcatgtacctctctagtcaaagtggtattacagacattcagtgacaatgaatcagtgttaattctaaatccttgatcctctgcaatgtgcttgaaaacacaaaccttttgggttaaaagctttaacatctattaggaagaatttgtcctgtgggtttggaatcttggattttccccctttatgaactgtactggctgttgaccaccagacacctgaccgcaaatatcttttcttgtattcccatatttctagacaatgatttttgtaagacaataaatttattcattatagatatttgcgcctgctctgtttacttgaagaaaaaagcacccgtggagaataaagagacctcaataaacaagaataatcatgtgaa

SEQ ID NO: 414 - DNA, 661 bp, Homo sapiens
ggagtggcagccggagtctgaactgtcctgggggaccaagcaggagcttaagatgggcaagacctggggccctgggcagacgcatcaaagcaggcagaagcaggcatggccagcaggaagaccaagaagaaggaagggggtgccctccgggcccagagagcctcatccaatgtcttctccaactttgagcagactcagatccaggagttcaaggaggcattcacactcatggatcagaaccgagatggcttcattgacaaggaggacctgaaggacacctatgcctccctgggcaagaccaacgtcaaggacgacgagctggacgccatgctcaaagaggcctcggggcccatcaacttcaccatgtttctgaacctgtttggggagaagctgagcggtaccgacgccgaggagaccattcttaacgccttcaagatgctggacccggacgggaaagggaaaatcaacaaggagtacatcaagcgtctgctgatgtcccaggctgacaagatgacggcggaagaggtggaccagatgttccagttcgcctccatcgatgtggcgggcaacctggactacaaggcgctcagctacgtgatcacccacggggaggagaaggaggagtgagacccagccgggtcaataaacctggacgcttgga

SEQ ID NO: 415 - DNA, 2406 bp, Homo sapiens
tctctctctgcttctttccttttctctctcatggtagggttatgagtcagttgccaaaaggtggggacatttcctgatgcatttgcaacactgagaagttatcttaagggaggctgggccccattctactcatctggcccagaaagtgaacaccttgggggccactaaggcagccctgctaggggagacgctccaacctgtcttctctctgtctcctggcagctctcttggcctcctagtttctacctaatcatgtccctggtggaggccatcagcctctggaatgaaggggtgctggcagcggacaagaaggactggaagggagccctggatgccttcagtgccgtccaggacccccactcccggatttgcttcaacattggctgcatgtacactatcctgaagaacatgactgaagcagagaaggcctttaccagaagcattaaccgagacaagcacttggcagtggcttacttccaacgagggatgctctactaccagacagagaaatatgatttggctatcaaagaccttaaagaagccttgattcagcttcgagggaaccagctgatagactataagatcctggggctccagttcaagctgtttgcctgtgaggtgttatataacattgctttcatgtatgccaagaaggaggaatggaaaaaagctgaagaacagttagcattggccacgagcatgaagtctgagcccagacattccaaaatcgacaaggcgatggagtgtgtctggaagcagaagctatatgagccagtggtgatccctgtgggcaagctgtttcgaccaaatgagagacaagtggctcagctggccaagaaggattacctaggcaaggcgacggtcgtggcatctgtggtggatcaagacagtttctctgggtttgcccctctgcaaccacaggcagctgagcctccacccagaccgaaaaccccagagatcttcagggctctggaaggggaggctcaccgtgtgctatttgggtttgtgcctgagacaaaagaagagctccaggtcatgccagggaacattgtctttgtcttgaagaagggcaatgataactgggccacggtcatgttcaacgggcagaaggggcttgttccctgcaactaccttgaaccagttgagctgcggatccaccctcagcagcagccccaggaggaaagctctccgcagtccgacatcccagctcctcctagttccaaagcccctggaagaccccagctgtcaccaggccagaaacaaaaagaagagcctaaggaagtgaagctcagtgttcccatgccctacacactcaaggtgcactacaagtacacggtagtcatgaagactcagcccgggctcccctacagccaggtccgggacatggtgtctaagaaactggagctccggctggaacacactaagctgagctatcggcctcgggacagcaatgagctggtgcccctttcagaagacagcatgaaggatgcctggggccaggtgaaaaactactgcctgactctgtggtgtgagaacacagtgggtgaccaaggctttccagatgaacccaaggaaagtgaaaaagctgatgctaataaccagacaacagaacctcagcttaagaaaggcagccaagtggaggcactcttcagttatgaggctacccaaccagaggacctggagtttcaggaaggggatataatcctggtgttatcaaaggtgaatgaagaatggctggaaggggagtgcaaagggaaggtgggcattttccccaaagtttttgttgaagactgcgcaactacagatttggaaagcactcggagagaagtctaggatgtttcacaaactacaaagctgaagaaaatgaagccctattacttgtttgtaagatttagcacccttctgctgtatactgtactgagacattacagtttggaagtgttaactatttattccctgttaaaatttaacctactagacaatgatgtgagtacccaggatgatttcctggggcacagtgggtgaggagatggggacaggtgaatggaggagttaggggagaggaaaagtggatggaagtgtctggaaagggcacgagagagtcttccaggtactgatcctgtttcttgctctgagtgctagctagccagctgtgttcacactgtaaacattcatcaagctgtacatttggtgcacttttctgtgtcataccacaataaaaaaaaacctagcatcttacaaaaacaagacacccaagtccaggcccaaggagtaagtacaaatattcctgtttctgaaccattactgtaattggctcttaaggcttgaagtaaccttataggttactcataaggcatatacaaataaacttgtttgttttcttttttcaaaaaaaaaaaaaaaaaa

SEQ ID NO: 416 - DNA, 1828 bp, Homo sapiens
gctttctgatttcagagactctccgcaacagaaccatctcaagtgggtctacctcctcgcctttttttgttgttgttgttgcttggctgcgcttctgacagggcaggccgtgatgatgtttgtttatgagttaggtccgactgttcgttggtgcttaagatccccaccgggtccctagggcctgtgcgtaccgcgcacctgtgcacgtcctgcgcgcagctgcaggcgactccgctctggctcgtcgctgctgtttcctgctgggggtgccgaccctgtcccacgctagctgggtgacttcccccaaccgcagagacagcggcgacccggggcctcagacctgcccccgcatctcgccggcgccaggcagtgggaagtcaggttcttccgccaccccccagccaggactctgccaccctccctcaggatgcctgagggccccgagctgcacctggccagccagtttgtgaatgaggcctgcagggcgctggtgttcggcggctgcgtggagaagtcctctgtcagccgcaaccctgaggtgccctttgagagcagtgcctaccgcatctcagcttcagcccgcggcaaggagctgcgcctgatactgagccctctgcctggggcccagccccaacaggagccactggccctggtcttccgcttcggcatgtccggctcttttcagctggtgccccgcgaggagctgccacgccatgcccacctgcgcttttacacggccccgcctggcccccggctcgccctatgtttcgtggacatccgccggttcggccgctgggaccttgggggaaagtggcagccgggccgcgggccctgtgtcttgcaggagtaccagcagttcagggagagtgtgctacgaaacctagcggataaggcctttgaccggcccatctgcgaggccctcctggaccagaggttcttcaatggcattggcaactatctgcgggcagagatcctgtaccggctgaagatccccccctttgagaaggcccgctcggtcctggaggccctgcagcagcacaggccgagcccggagctgaccctgagccagaagataaggaccaagctgcagaatccagacctgctggagctatgtcactcagtgcccaaggaagtggtccagttggggggcaggggctacgggtcagagagcggggaggaggactttgctgcctttcgagcctggctgcgctgctatggcatgccaggcatgagctccctgcaggaccggcatggccgtaccatctggttccagggggatcctggaccgttggcacccaaagggcgcaagtcccgcaaaaagaaatccaaggccacacagctgagtcctgaggacagagtggaggacgctttgcctccaagcaaggccccttccaggacacgaagggcaaagagagaccttcctaagaggactgcaacccagcggcctgaggggaccagcctccagcaggacccagaagctcccacagtgcccaagaaggggaggaggaaggggcgacaggcagcctctggccactgcagaccccggaaggtcaaggctgacatcccatccttggaaccagaggggacctcagcctcttagcaggaggctctccttgcttgcactcaccctttcttattgtcttgccctgcatctgggggtctgaatttttgggagcaggcaatatctgaaggtgcaaacaggccctacggctgttccctgcacaactctcatggttttaattgtaccccatcttccacatctttaaagctcatgtgaaaaatgctgcatttttaataaactgatacatttgaaaaaaaaaaaaaaaaa

SEQ ID NO: 417 - DNA, 5903 bp, Homo sapiens
gggaggcgggaggagagggggctgccaggggcgtccggttacatccccgccttcctctgtcctggccgcgggaccgggtttgcgggaccgcagttcgggaacatgttggcctcgagcagccggatccgggctgcgtggacgcgggcgctgctgctgccgctgctgctggcggggcctgtgggctgcctgagccgccaggagctctttcccttcggccccggacagggggacctggagctggaggacggggatgacttcgtctctcctgccctggagctgagtggggcgctccgcttctacgacagatccgacatcgacgcagtctacgtcaccacaaatggcatcattgctacgagtgaacccccggccaaagaatcccatcccgggctcttcccaccaacattcggtgcagtcgcccctttcctggcggacttggacacgaccgatggcctggggaaggtttattatcgagaagacttatccccctccatcactcagcgagcagcagagtgtgtccacagagggttcccggagatctctttccagcctagtagcgcggtggttgtcacttgggaatccgtggccccctaccaagggcccagcagggacccagaccagaaaggcaagagaaacacgttccaggctgttctagcctcctctgattccagctcctatgccattttcctttatcctgaggatggtctgcagttccatacgacattctcaaagaaggaaaacaaccaagttcctgccgtggttgcattcagtcaaggttcagtgggattcttatggaagagcaacggagcttataacatatttgctaatgacagggaatcagttgaaaatttggccaagagtagtaactctgggcagcagggtgtctgggtgtttgagattgggagtccagccaccaccaatggcgtggtgcctgcagacgtgatcctcggaactgaagatggggcagagtatgatgatgaggatgaagattatgacctggcgaccactcgtctgggcctggaggatgtgggcaccacgcccttctcctacaaggctctgagaaggggaggtgctgacacatacagtgtgcccagcgtcctctccccgcgccgggcagctaccgaaaggccccttggacctcccacagagagaaccaggtctttccagttggcagtggagacttttcaccagcagcaccctcaggtcatagatgtggatgaagttgaggaaacaggagttgttttcagctataacacggattcccgccagacgtgtgctaacaacagacaccagtgctcggtgcacgcagagtgcagggactacgccacgggcttctgctgcagctgtgtcgctggctatacgggcaatggcaggcaatgtgttgcagaaggttccccccagcgagtcaatggcaaggtgaaaggaaggatctttgtggggagcagccaggtccccattgtctttgagaacactgacctccactcttacgtagtaatgaaccacgggcgctcctacacagccatcagcaccattcccgagaccgttggatattctctgcttccactggccccagttggaggcatcattggatggatgtttgcagtggagcaggacggattcaagaatgggttcagcatcaccgggggtgagttcactcgccaggctgaggtgaccttcgtggggcacccgggcaatctggtcattaagcagcggttcagcggcatcgatgagcatgggcacctgaccatcgacacggagctggagggccgcgtgccgcagattccgttcggctcctccgtgcacattgagccctacacggagctgtaccactactccacctcagtgatcacttcctcctccacccgggagtacacggtgactgagcccgagcgagatggggcatctccttcacgcatctacacttaccagtggcgccagaccatcaccttccaggaatgcgtccacgatgactcccggccagccctgcccagcacccagcagctctcggtggacagcgtgttcgtcctgtacaaccaggaggagaagatcttgcgctatgctctcagcaactccattgggcctgtgagggaaggctcccctgatgctcttcagaatccctgctacatcggcactcatgggtgtgacaccaacgcggcctgtcgccctggtcccaggacacagttcacctgcgagtgctccatcggcttccgaggagacgggcgaacctgctatgatattgatgaatgttcagaacaaccctcagtgtgtgggagccacacaatctgcaataatcacccaggaaccttccgctgcgagtgtgtggagggctaccagttttcagatgagggaacgtgtgtggctgtcgtggaccagcgccccatcaactactgtgaaactggccttcataactgcgacataccccagcgggcccagtgtatctacacaggaggctcctcctacacctgttcctgcttgccaggcttttctggggatggccaagcctgccaagatgtagatgaatgccagccaagccgatgtcaccctgacgccttctgctacaacactccaggctctttcacgtgccagtgcaaacctggttatcagggagacggcttccgttgcgtgcccggagaggtggagaaaacccggtgccagcacgagcgagaacacattctcggggcagcgggggcgacagacccacagcgacccattcctccggggctgttcgttcctgagtgcgatgcgcacgggcactacgcgcccacccagtgccacggcagcaccggctactgctggtgcgtggatcgcgacggccgcgaggtggagggcaccaggaccaggcccgggatgacgcccccgtgtctgagtacagtggctcccccgattcaccaaggacctgcggtgcctaccgccgtgatccccttgcctcctgggacccatttactctttgcccagactgggaagattgagcgcctgcccctggagggaaataccatgaggaagacagaagcaaaggcgttccttcatgtcccggctaaagtcatcattggactggcctttgactgcgtggacaagatggtttactggacggacatcactgagccttccattgggagagctagtctacatggtggagagccaaccaccatcattagacaagatcttggaagtccagaaggtatcgctgttgatcaccttggccgcaacatcttctggacagactctaacctggatcgaatagaagtggcgaagctggacggcacgcagcgccgggtgctctttgagactgacttggtgaatcccagaggcattgtaacggattccgtgagagggaacctttactggacagactggaacagagataaccccaagattgaaacttcctacatggacggcacgaaccggaggatccttgtgcaggatgacctgggcttgcccaatggactgaccttcgatgcgttctcatctcagctctgctgggtggatgcaggcaccaatcgggcggaatgcctgaaccccagtcagcccagcagacgcaaggctctcgaagggctccagtatccttttgctgtgacgagctacgggaagaatctgtatttcacagactggaagatgaattccgtggttgctctcgatcttgcaatttccaaggagacggatgctttccaaccccacaagcagacccggctgtatggcatcaccacggccctgtctcagtgtccgcaaggccataactactgctcagtgaacaatggcggctgcacccacctatgcttggccaccccagggagcaggacctgccgttgccctgacaacaccttgggagttgactgtatcgaacagaaatgaagacaagagtgccttatttcctttccaagtatttcacagcaacactctacttgaagcaacttggtccagattgaaaagtgtcctctggctgagtggccactaggcccagacccagcccagcctgagccccaacaacttttccctcactgttccccaaaacatgcaccctggacttctctaatagaaaagtctccacccctacacaaggacagaaccctccacccctacccccaaccctcagacagacttatacacccctgagtgaggattacatgcccatcccagtgtcctaggaccttttcccaatactagccccccagtggtgaacagaacctcccaaatttgagttgcacccttccctgtggccttatgagctcagcctcgctttgaggtacccaccgtcctgtcagctccttgacctatgagccggggcctgactaggaaaagttgggagttaaggaggaaattagcattccttaatgttttgttttggtgctctgaatttcttctttattatagtcctatagttttactcctcagttcctcaccatcatcatcttgtctaagacccccattataatattcatgcgctgctttttcatcaaaacctaccctgtcctagagatctatgggcatttggtggatgataatgagcagcccctcccagatagaatgtcaatatttgagcagtaggatattggcatttgttagttaaaggcttaaatcaaaagaatgtccaatggtaggaatttcaaggtgtaggtcagatatttgagaataggggatttttttgatgtgccttaaattataccaaagattactaattattcctctttgcccaaaatacttgcatccaaggttctagtctctgttgctgtgctggtctttagccccactgcttgcactgatgtccctccttttcacggagacctatctgaggtacaggatggggctggcaccagatgatgtcccaccacagtccctcacctccggcctccacatgacagaaccaatttacactcaaccatgacctcacccctccttggtttctccctcgatctgtggccctttttggatgtattcttatctaacaacacaatccggaaagactgaattgaatatttatactaatggttcatatcctttattgctcaatgatctaattaaagggatcattgccacatttcatgtttatatttctacaatttgtttagaaaacatctcctgaccatatcagtagctcgtgttatctttttatcaactgcttcccagagtcctaaaacaatagaaattttggattgaaaagttcagcataaggagtttgagtcagtaaaggatgggataaaggagtcgagatgattcaatgaaaagtatcacaaaaaagagattgatcaacaagagaaataaaaaagcccaagaggaagtggtaggggaaggaatttaagaacagcaataagtaaaactcttaagtaactccaaaaagaaaatggtacattttgccaaagaccacttatacttgagaacatggaagaatttgcctgatactctctttggggaaaagagtctctcctcttttcctcaaaccccagtacactcagcctctctgccccaccttctcctgactttgtcctcacttgcttctgcagtacattggaacctgaattgaaagaaagtcttccttgaataattggagtttgtcttgagaggcaaatatagccccaagaatcacaagattcgaggaccatgtaggtcttttacgtagcccaaatccataaattagtctcactttttgtatttatcgtttcatattaaaccctctatatcaaatgttcatcatgattttgtatgatttttataactattttattcattttattagatttattctaaaattttttaatggtaaattcttaaactgtggaaaccactgaaggtgcttattaactgttctcccagatttgtacaagtattggatgattccttgagtttacagctgtacaaatagtgtggaaaataaactttttttaaaaaagaaaaaaaaaaaaaaaaaaaaaaaa

SEQ ID NO: 418 - DNA, 5063 bp, Homo sapiens
gccttagaaaagttaacgagaaccagatgtggtggccactgccgaactttctcagagccggtgattggtccccagccgagggcctcagccaattagcttgctgggtgggcctggagtcccgccccgcccaggcgcccgcggagatccaggttcgaggctggcgcggcgcggagagtgggctggaggccggggcgggacgcgttgtgcagcgggtaagcgcacggccgagcgagcatggagggggaccgggtggccgggcggccggtgctgtcgtcgttaccagtgctactgctgctgccgttgctaatgttgcgggccgcggcgctgcacccagacgagctcttcccacacggggagtcgtggggggaccagctcctgcaggaaggcgacgacgaaagctcagccgtggtgaagctggcgaatcccctgcacttctacgaagcccgattcagcaacctctacgtgggcaccaacggcatcatctccactcaggacttccccagggaaacgcagtatgtggactatgatttccccaccgacttcccggccatcgccccttttctggcggacatcgacacgagccacggcagaggccgagtcctgtaccgagaggacacctcccccgcagtgctgggcctggccgcccgctatgtgcgcgctggcttcccgcgctctgcgcgctttacccccacccacgccttcctggccacctgggagcaggtaggcgcttacgaggaggtcaagcgcggggcgctgccctcgggagagctgaacactttccaggcagttttggcatctgatgggtctgatagctacgccctctttctttatcctgccaacggcctgcagttccttggaacccgccccaaagagtcttacaatgtccagcttcagcttccagctcgggtgggcttctgccgaggggaggctgatgatctgaagtcagaaggaccatatttcagcttgactagcactgaacagtctgtgaaaaatctctatcaactaagcaacctggggatccctggagtgtgggctttccatatcggcagcacttccccgttggacaatgtcaggccagctgcagttggagacctttccgctgcccactcttctgttcccctgggacgttccttcagccatgctacagccctggaaagtgactataatgaggacaatttggattactatgatgtgaatgaggaggaagctgaataccttccgggtgaaccagaggaggcattgaatggccacagcagcattgatgtttccttccaatccaaagtggatacaaagcctttagaggaatcttccaccttggatcctcacaccaaagaaggaacatctctgggagaggtagggggcccagatttaaaaggccaagttgagccctgggatgagagagagaccagaagcccagctccaccagaggtagacagagattcactggctccttcctgggaaaccccaccaccgtaccccgaaaacggaagcatccagccctacccagatggagggccagtgccttcggaaatggatgttcccccagctcatcctgaagaagaaattgttcttcgaagttaccctgcttcaggtcacactacacccttaagtcgagggacgtatgaggtgggactggaagacaacataggttccaacaccgaggtcttcacgtataatgctgccaacaaggaaacctgtgaacacaaccacagacaatgctcccggcatgccttctgcacggactatgccactggcttctgctgccactgccaatccaagttttatggaaatgggaagcactgtctgcctgaaggggcacctcaccgagtgaatgggaaagtgagtggccacctccacgtgggccatacacccgtgcacttcactgatgtggacctgcatgcgtatatcgtgggcaatgatggcagagcctacacggccatcagccacatcccacagccagcagcccaggccctcctccccctcacaccaattggaggcctgtttggctggctctttgctttagaaaaacctggctctgagaacggcttcagcctcgcaggtgctgcctttacccatgacatggaagttacattctacccgggagaggagacggttcgtatcactcaaactgctgagggacttgacccagagaactacctgagcattaagaccaacattcaaggccaggtgccttacgtctcagcaaatttcacagcccacatctctccctacaaggagctgtaccactactccgactccactgtgacctctacaagttccagagactactctctgacttttggtgcaatcaaccaaacatggtcctaccgcatccaccagaacatcacttaccaggtgtgcaggcacgcccccagacacccgtccttccccaccacccagcagctgaacgtggaccgggtctttgccttgtataatgacgaagaaagagtgcttagatttgctgtgaccaatcaaattggcccggtcaaagaggattcagaccccactccggggaatccttgctatgatgggagccacatgtgtgacacaacagcacggtgccatccagggacaggtgtagattacacctgtgagtgcgcatctgggtaccagggagatggacggaactgtgtggatgaaaatgaatgtgcaactggctttcatcgctgtggccccaactctgtatgtatcaacttgcctggaagctacaggtgtgagtgccggagtggttatgagtttgcagatgaccggcatacttgcatcttgatcaccccacctgccaacccctgtgaggatggcagtcatacctgtgctcctgctgggcaggcccggtgtgttcaccatggaggcagcacgttcagctgtgcctgcctgcctggttatgccggcgatgggcaccagtgcactgatgtagatgaatgctcagaaaacagatgtcaccctgcagctacctgctacaatactcctggttccttctcctgccgttgtcaacccggatattatggggatggatttcagtgcatacctgactccacctcaagcctgacaccctgtgaacaacagcagcgccatgcccaggcccagtatgcctaccctggggcccggttccacatcccccaatgcgacgagcagggcaacttcctgcccctacagtgtcatggcagcactggtttctgctggtgcgtggaccctgatggtcatgaagttcctggtacccagactccacctggctccaccccgcctcactgtggaccatcaccagagcccacccagaggcccccgaccatctgtgagcgctggagggaaaacctgctggagcactacggtggcaccccccgggatgaccagtacgtgccccagtgcgatgacctgggccacttcatccccctgcagtgccacggaaagagcgacttctgctggtgtgtggacaaagatggcagagaggtgcagggcacccgctcccagccaggcaccacccctgcgtgtatacccaccgtcgctccacccatggtccggcccacgccccggccagatgtgacccctccatctgtgggcaccttcctgctctatactcagggccagcagattggctacttacccctcaatggcaccaggcttcagaaggatgcagctaagaccctgctgtctctgcatggctccataatcgtgggaattgattacgactgccgggagaggatggtgtactggacagatgttgctggacggacaatcagccgtgctggtctggaactgggagcagagcctgagacgatcgtgaattcaggtctgataagccctgaaggacttgccatagaccacatccgcagaacaatgtactggacggacagtgtcctggataagatagagagcgccctgctggatggctctgagcgcaaggtcctcttctacacagatctggtgaatccccgtgccatcgctgtggatccaatccgaggcaacttgtactggacagactggaatagagaagctcctaaaattgaaacgtcatctttagatggagaaaacagaagaattctgatcaatacagacattggattgcccaatggcttaacctttgaccctttctctaaactgctctgctgggcagatgcaggaaccaaaaaactggagtgtacactacctgatggaactggacggcgtgtcattcaaaacaacctcaagtaccccttcagcatcgtaagctatgcagatcacttctaccacacagactggaggagggatggtgttgtatcagtaaataaacatagtggccagtttactgatgagtatctcccagaacaacgatctcacctctacgggataactgcagtctacccctactgcccaacaggaagaaagtaagtacagtaatgtaaaggaagacttggagtttacaatcagaacctggaccctaaagaacagtgactgcaaaggcaaagaaagtaaaaaaggaattggccattagacgttcctgagcatccaagatgaacattttgtagtgcaaaaagacttttgtgaaaagctgatacctcaatctttactactgtatttttaaaaatgaaggttgttattgcaagtttaaaaaggtaacagaattttaactgttgcttattaaagcaacttcttgtaaacatttatcattaatatttaaaagatcaaattcattcaactaagaattagagtttaagactctaaacctgatttttgccatggattccttctggccaagaaattaaagcacatgtgatcaatataacaatataatcctaaaccttgacagttggagaagccaatgcagaactgatgggaaaggaccaattatttatagtttcccaacaaaagttctaagattttttacctctgcatcagtgcatttctatttatatcaaaaggtgctaaaatgattcaatttgcattttctgatcctgtagtgcctctatagaagtacccacagaaagtaaagtatcacatttataaataccaaagatgtaacaattttaaaattttctagattactccaataaagtgttttaagttttcctatgaaaaaaaaaaaaaaaaaa

SEQ ID NO: 419 - DNA, 1073 bp, Homo sapiens
atgtgcacacacatacactcacacgtgtgtgcaggtgcacacctcccccagaggctgcagccaagacgggcatcccacatcagagggatgaatggcaggtctgtcccgccagctgtgtgctctctcccacccgaagaaagcagcagagactcagacggcggagcctggaggagcccacgcagtctgttcccggcacccggtgcgtgtgaagggacttgagggcagcgagatggaatcagcaagagaaaacatcgaccttcaacctggaagctccgaccccaggagccagcccatcaacctgaaccattacgccaccaagaagagcgtggcggagagcatgctggacgtggccctgttcatgtccaacgccatgcggctgaaggcggtgctggagcagggaccatcctctcactactacaccaccctggtcaccctcatcagcctctctctgctcctgcaggtggtcatcggtgtcctgctcgtggtcattgcacggctgaacctgaatgaggtagaaaagcagtggcgactcaaccagctcaacaacgcagccaccatcttggtcttcttcactgtggtcatcaatgttttcattacagccttcggggcacataaaacagggttcctggctgccagggcctcaaggaatcctctctgaatgcagcctgggacccaggttctgggcctggaacttctgcctccttcctccgtgatctgccaggctcgtgggcactttccacagcccaggagagcttctgaaaggacagtatagctgcccttgctccctacccacagcacctgagttaaaaagtgatttttatgttattggtctaagggacttccatcttggtctgaagtcctgagctcagacgcaggtactgccagccataccttcctggtagcatctgctggacctaagtaaggcatgtctgtctaaggccaagtctgcccggcttaaggatgctggttctgactctaccccactgcttccttctgctccaggcctcaattttcccttcttgtaaaatggaatctatatctataaaggtttcttcaaatccaaaaaaaaaaaa

SEQ ID NO: 420 - DNA, 817 bp, Homo sapiens
agtcctgcgtccgggccccgaggcgcagcagggcaccaggtggagcaccagctacgcgtggcgcagcgcagcgtccctagcaccgagcctcccgcagccgccgagatgctgcgaacagagagctgccgccccaggtcgcccgccggacaggtggccgcggcgtccccgctcctgctgctgctgctgctgctcgcctggtgcgcgggcgcctgccgaggtgctccaatattacctcaaggattacagcctgaacaacagctacagttgtggaatgagatagatgatacttgttcgtcttttctgtccattgattctcagcctcaggcatccaacgcactggaggagctttgctttatgattatgggaatgctaccaaagcctcaggaacaagatgaaaaagataatactaaaaggttcttatttcattattcgaagacacagaagttgggcaagtcaaatgttgtgtcgtcagttgtgcatccgttgctgcagctcgttcctcacctgcatgagagaagaatgaagagattcagagtggacgaagaattccaaagtccctttgcaagtcaaagtcgaggatattttttattcaggccacggaatggaagaaggtcagcagggttcatttaaaatggatgccagctaattttccacagagcaatgctatggaatacaaaatgtactgacattttgttttcttctgaaaaaaatccttgctaaatgtactctgttgaaaatccctgtgttgtcaatgttctcagttgtaacaatgttgtaaatgttcaatttgttgaaaattaaaaaatctaaaaataaa

SEQ ID NO: 421 - DNA, 4104 bp, Homo sapiens
ataactttgtagcgagtcgaaaactgaggctccggccgcagagaactcagcctcattcctgctttaaaatctctcggccacctttgatgaggggactgggcagttctagacagtcccgaagttctcaaggcacaggtctcttcctggtttgactgtccttaccccggggaggcagtgcagccagctgcaagccccacagtgaagaacatctgagctcaaatccagataagtgacataagtgacctgctttgtaaagccatagagatggcctgtccttggaaatttctgttcaagaccaaattccaccagtatgcaatgaatggggaaaaagacatcaacaacaatgtggagaaagccccctgtgccacctccagtccagtgacacaggatgaccttcagtatcacaacctcagcaagcagcagaatgagtccccgcagcccctcgtggagacgggaaagaagtctccagaatctctggtcaagctggatgcaaccccattgtcctccccacggcatgtgaggatcaaaaactggggcagcgggatgactttccaagacacacttcaccataaggccaaagggattttaacttgcaggtccaaatcttgcctggggtccattatgactcccaaaagtttgaccagaggacccagggacaagcctacccctccagatgagcttctacctcaagctatcgaatttgtcaaccaatattacggctccttcaaagaggcaaaaatagaggaacatctggccagggtggaagcggtaacaaaggagatagaaacaacaggaacctaccaactgacgggagatgagctcatcttcgccaccaagcaggcctggcgcaatgccccacgctgcattgggaggatccagtggtccaacctgcaggtcttcgatgcccgcagctgttccactgcccgggaaatgtttgaacacatctgcagacacgtgcgttactccaccaacaatggcaacatcaggtcggccatcaccgtgttcccccagcggagtgatggcaagcacgacttccgggtgtggaatgctcagctgtgcatcgacctgggctggaagcccaatggccgtgaccctgagctcttcgaaatcccacctgaccttgtgcttgaggtggccatggaacatcccaaatacgagtggtttcgggaactggagctaaagtggtacgccctgcctgcagtggccaacatgctgcttgaggtgggcggcctggagttcccagggtgccccttcaatggctggtacatgggcacagagatcggagtccgggacttctgtgacgtccagcgctacaacatcctggaggaagtgggcaggagaatgggcctggaaacgcacaagctggcctcgctctggaaagaccaggctgtcgttgagatcaacattgctgtgctccatagtttccagaagcagaatgtgaccatcatggaccaccactcggctgcagaatccttcatgaagtacatgcagaatgaataccggtcccgtgggggctgcccggcagactggatttggctggtccctcccatgtctgggagcatcacccccgtgtttcaccaggagatgctgaactacgtcctgtcccctttctactactatcaggtagaggcctggaaaacccatgtctggcaggacgagaagcggagacccaagagaagagagattccattgaaagtcttggtcaaagctgtgctctttgcctgtatgctgatgcgcaagacaatggcgtcccgagtcagagtcaccatcctctttgcgacagagacaggaaaatcagaggcgctggcctgggacctgggggccttattcagctgtgccttcaaccccaaggttgtctgcatggataagtacaggctgagctgcctggaggaggaacggctgctgttggtggtgaccagtacgtttggcaatggagactgccctggcaatggagagaaactgaagaaatcgctcttcatgctgaaagagctcaacaacaaattcaggtacgctgtgtttggcctcggctccagcatgtaccctcggttctgcgcctttgctcatgacattgatcagaagctgtcccacctgggggcctctcagctcaccccgatgggagaaggggatgagctcagtgggcaggaggacgccttccgcagctgggccgtgcaaaccttcaaggcagcctgtgagacgtttgatgtccgaggcaaacagcacattcagatccccaagctctacacctccaatgtgacctgggacccgcaccactacaggctcgtgcaggactcacagcctttggacctcagcaaagccctcagcagcatgcatgccaagaacgtgttcaccatgaggctcaaatctcggcagaatctacaaagtccgacatccagccgtgccaccatcctggtggaactctcctgtgaggatggccaaggcctgaactacctgccgggggagcaccttggggtttgcccaggcaaccagccggccctggtccaaggtatcctggagcgagtggtggatggccccacaccccaccagacagtgcgcctggaggccctggatgagagtggcagctactgggtcagtgacaagaggctgcccccctgctcactcagccaggccctcacctacttcctggacatcaccacacccccaacccagctgctgctccaaaagctggcccaggtggccacagaagagcctgagagacagaggctggaggccctgtgccagccctcagagtacagcaagtggaagttcaccaacagccccacattcctggaggtgctagaggagttcccgtccctgcgggtgtctgctggcttcctgctttcccagctccccattctgaagcccaggttctactccatcagctcctcccgggatcacacgcccacagagatccacctgactgtggccgtggtcacctaccacacccgagatggccagggtcccctgcaccacggcgtctgcagcacatggctcaacagcctgaagccccaagacccagtgccctgctttgtgcggaatgccagcggcttccacctccccgaggatccctcccatccttgcatcctcatcgggcctggcacaggcatcgcgcccttccgcagtttctggcagcaacggctccatgactcccagcacaagggagtgcggggaggccgcatgaccttggtgtttgggtgccgccgcccagatgaggaccacatctaccaggaggagatgctggagatggcccagaagggggtgctgcatgcggtgcacacagcctattcccgcctgcctggcaagcccaaggtctatgttcaggacatcctgcggcagcagctggccagcgaggtgctccgtgtgctccacaaggagccaggccacctctatgtttgcggggatgtgcgcatggcccgggacgtggcccacaccctgaagcagctggtggctgccaagctgaaattgaatgaggagcaggtcgaggactatttctttcagctcaagagccagaagcgctatcacgaagatatctttggtgctgtatttccttacgaggcgaagaaggacagggtggcggtgcagcccagcagcctggagatgtcagcgctctgagggcctacaggaggggttaaagctgccggcacagaacttaaggatggagccagctctgcattatctgaggtcacagggcctggggagatggaggaaagtgatatcccccagcctcaagtcttatttcctcaacgttgctccccatcaagccctttacttgacctcctaacaagtagcaccctggattgatcggagcctcctctctcaaactggggcctccctggtcccttggagacaaaatcttaaatgccaggcctggcaagtgggtgaaagatggaacttgctgctgagtgcaccacttcaagtgaccaccaggaggtgctatcgcaccactgtgtatttaactgccttgtgtacagttatttatgcctctgtatttaaaaaactaacacccagtctgttccccatggccacttgggtcttccctgtatgattccttgatggagatatttacatgaattgcattttactttaatcacaaaaaaaaaaaaaaaa

SEQ ID NO: 422 - DNA, 4221 bp, Homo sapiens
ataactttgtagcgagtcgaaaactgaggctccggccgcagagaactcagcctcattcctgctttaaaatctctcggccacctttgatgaggggactgggcagttctagacagtcccgaagttctcaaggcacaggtctcttcctggtttgactgtccttaccccggggaggcagtgcagccagctgcaagccccacagtgaagaacatctgagctcaaatccagataagtgacataagtgacctgctttgtaaagccatagagatggcctgtccttggaaatttctgttcaagaccaaattccaccagtatgcaatgaatggggaaaaagacatcaacaacaatgtggagaaagccccctgtgccacctccagtccagtgacacaggatgaccttcagtatcacaacctcagcaagcagcagaatgagtccccgcagcccctcgtggagacgggaaagaagtctccagaatctctggtcaagctggatgcaaccccattgtcctccccacggcatgtgaggatcaaaaactggggcagcgggatgactttccaagacacacttcaccataaggccaaagggattttaacttgcaggtccaaatcttgcctggggtccattatgactcccaaaagtttgaccagaggacccagggacaagcctacccctccagatgagcttctacctcaagctatcgaatttgtcaaccaatattacggctccttcaaagaggcaaaaatagaggaacatctggccagggtggaagcggtaacaaaggagatagaaacaacaggaacctaccaactgacgggagatgagctcatcttcgccaccaagcaggcctggcgcaatgccccacgctgcattgggaggatccagtggtccaacctgcaggtcttcgatgcccgcagctgttccactgcccgggaaatgtttgaacacatctgcagacacgtgcgttactccaccaacaatggcaacatcaggtcggccatcaccgtgttcccccagcggagtgatggcaagcacgacttccgggtgtggaatgctcagctcatccgctatgctggctaccagatgccagatggcagcatcagaggggaccctgccaacgtggaattcactcagctgtgcatcgacctgggctggaagcccaagtacggccgcttcgatgtggtccccctggtcctgcaggccaatggccgtgaccctgagctcttcgaaatcccacctgaccttgtgcttgaggtggccatggaacatcccaaatacgagtggtttcgggaactggagctaaagtggtacgccctgcctgcagtggccaacatgctgcttgaggtgggcggcctggagttcccagggtgccccttcaatggctggtacatgggcacagagatcggagtccgggacttctgtgacgtccagcgctacaacatcctggaggaagtgggcaggagaatgggcctggaaacgcacaagctggcctcgctctggaaagaccaggctgtcgttgagatcaacattgctgtgctccatagtttccagaagcagaatgtgaccatcatggaccaccactcggctgcagaatccttcatgaagtacatgcagaatgaataccggtcccgtgggggctgcccggcagactggatttggctggtccctcccatgtctgggagcatcacccccgtgtttcaccaggagatgctgaactacgtcctgtcccctttctactactatcaggtagaggcctggaaaacccatgtctggcaggacgagaagcggagacccaagagaagagagattccattgaaagtcttggtcaaagctgtgctctttgcctgtatgctgatgcgcaagacaatggcgtcccgagtcagagtcaccatcctctttgcgacagagacaggaaaatcagaggcgctggcctgggacctgggggccttattcagctgtgccttcaaccccaaggttgtctgcatggataagtacaggctgagctgcctggaggaggaacggctgctgttggtggtgaccagtacgtttggcaatggagactgccctggcaatggagagaaactgaagaaatcgctcttcatgctgaaagagctcaacaacaaattcaggtacgctgtgtttggcctcggctccagcatgtaccctcggttctgcgcctttgctcatgacattgatcagaagctgtcccacctgggggcctctcagctcaccccgatgggagaaggggatgagctcagtgggcaggaggacgccttccgcagctgggccgtgcaaaccttcaaggcagcctgtgagacgtttgatgtccgaggcaaacagcacattcagatccccaagctctacacctccaatgtgacctgggacccgcaccactacaggctcgtgcaggactcacagcctttggacctcagcaaagccctcagcagcatgcatgccaagaacgtgttcaccatgaggctcaaatctcggcagaatctacaaagtccgacatccagccgtgccaccatcctggtggaactctcctgtgaggatggccaaggcctgaactacctgccgggggagcaccttggggtttgcccaggcaaccagccggccctggtccaaggtatcctggagcgagtggtggatggccccacaccccaccagacagtgcgcctggaggccctggatgagagtggcagctactgggtcagtgacaagaggctgcccccctgctcactcagccaggccctcacctacttcctggacatcaccacacccccaacccagctgctgctccaaaagctggcccaggtggccacagaagagcctgagagacagaggctggaggccctgtgccagccctcagagtacagcaagtggaagttcaccaacagccccacattcctggaggtgctagaggagttcccgtccctgcgggtgtctgctggcttcctgctttcccagctccccattctgaagcccaggttctactccatcagctcctcccgggatcacacgcccacagagatccacctgactgtggccgtggtcacctaccacacccgagatggccagggtcccctgcaccacggcgtctgcagcacatggctcaacagcctgaagccccaagacccagtgccctgctttgtgcggaatgccagcggcttccacctccccgaggatccctcccatccttgcatcctcatcgggcctggcacaggcatcgcgcccttccgcagtttctggcagcaacggctccatgactcccagcacaagggagtgcggggaggccgcatgaccttggtgtttgggtgccgccgcccagatgaggaccacatctaccaggaggagatgctggagatggcccagaagggggtgctgcatgcggtgcacacagcctattcccgcctgcctggcaagcccaaggtctatgttcaggacatcctgcggcagcagctggccagcgaggtgctccgtgtgctccacaaggagccaggccacctctatgtttgcggggatgtgcgcatggcccgggacgtggcccacaccctgaagcagctggtggctgccaagctgaaattgaatgaggagcaggtcgaggactatttctttcagctcaagagccagaagcgctatcacgaagatatctttggtgctgtatttccttacgaggcgaagaaggacagggtggcggtgcagcccagcagcctggagatgtcagcgctctgagggcctacaggaggggttaaagctgccggcacagaacttaaggatggagccagctctgcattatctgaggtcacagggcctggggagatggaggaaagtgatatcccccagcctcaagtcttatttcctcaacgttgctccccatcaagccctttacttgacctcctaacaagtagcaccctggattgatcggagcctcctctctcaaactggggcctccctggtcccttggagacaaaatcttaaatgccaggcctggcaagtgggtgaaagatggaacttgctgctgagtgcaccacttcaagtgaccaccaggaggtgctatcgcaccactgtgtatttaactgccttgtgtacagttatttatgcctctgtatttaaaaaactaacacccagtctgttccccatggccacttgggtcttccctgtatgattccttgatggagatatttacatgaattgcattttactttaatcacaaaaaaaaaaaaaaaa

SEQ ID NO: 423 - DNA, 2382 bp, Homo sapiens
gctgatagcacagttctgtccagagaaggaaggcagaataaacttattcattcccaggaactcttggggtaggtgtgtgtttttcacatcttaaaggctcacagaccctgcgctggacaaatgttccattcctgaaggacctctccagaatccggattgctgaatcttccctgttgcctagaagggctccaaaccacctcttgacaatgggaaactgggtggttaaccactggttttcagttttgtttctggttgtttggttagggctgaatgttttcctgtttgtggatgccttcctgaaatatgagaaggccgacaaatactactacacaagaaaaatccttgggtcaacattggcctgtgcccgagcgtctgctctctgcttgaattttaacagcacgctgatcctgcttcctgtgtgtcgcaatctgctgtccttcctgaggggcacctgctcattttgcagccgcacactgagaaagcaattggatcacaacctcaccttccacaagctggtggcctatatgatctgcctacatacagctattcacatcattgcacacctgtttaactttgactgctatagcagaagccgacaggccacagatggctcccttgcctccattctctccagcctatctcatgatgagaaaaaggggggttcttggctaaatcccatccagtcccgaaacacgacagtggagtatgtgacattcaccagcattgctggtctcactggagtgatcatgacaatagccttgattctcatggtaacttcagctactgagttcatccggaggagttattttgaagtcttctggtatactcaccacctttttatcttctatatccttggcttagggattcacggcattggtggaattgtccggggtcaaacagaggagagcatgaatgagagtcatcctcgcaagtgtgcagagtcttttgagatgtgggatgatcgtgactcccactgtaggcgccctaagtttgaagggcatccccctgagtcttggaagtggatccttgcaccggtcattctttatatctgtgaaaggatcctccggttttaccgctcccagcagaaggttgtgattaccaaggttgttatgcacccatccaaagttttggaattgcagatgaacaagcgtggcttcagcatggaagtggggcagtatatctttgttaattgcccctcaatctctctcctggaatggcatccttttactttgacctctgctccagaggaagatttcttctccattcatatccgagcagcaggggactggacagaaaatctcataagggctttcgaacaacaatattcaccaattcccaggattgaagtggatggtccctttggcacagccagtgaggatgttttccagtatgaagtggctgtgctggttggagcaggaattggggtcaccccctttgcttctatcttgaaatccatctggtacaaattccagtgtgcagaccacaacctcaaaacaaaaaaggttggtcatgcagcattaaactttgacaaggccactgacatcgtgacaggtctgaaacagaaaacctcctttgggagaccaatgtgggacaatgagttttctacaatagctacctcccaccccaagtctgtagtgggagttttcttatgtggccctcggactttggcaaagagcctgcgcaaatgctgtcaccgatattccagtctggatcctagaaaggttcaattctacttcaacaaagaaaatttttgagttataggaataaggacggtaatctgcattttgtctctttgtatcttcagtaatttacttggtctcgtcaggtttgagcagtcactttaggataagaatgtgcctctcaagccttgactccctggtattctttttttgattgcattcaacttcgttacttgagcttcagcaacttaagaacttctgaagttcttaaagttctgaagttcttaaagcccatggatcctttctcagaaaaataactgtaaatctttctggacagccatgactgtagcaaggcttgatagcagaggtttggtggttcagagttatacaactaatcccaggtgattttatcaattccagtgttaccatctcctgagttttggtttgtaatcttttgtccctcccacccccacagaagatttctaagtagggtgactttttaaataaaaatttattgaataattaatgataaaacataataataaacataaataataaacaaaattaccgagaaccccatccccatataacaccaacagtgtacatgtttactgtcacttttgatatggtcttatccagtgtgaacagcaatttattcttatttttgctcatcaaaaaataaaggattttcttcttcacttga

SEQ ID NO: 424 - DNA, 5385 bp, Homo sapiens
tctgccccaccccgtcccgttccgttccgctgcccagtcctgctggtactcactaggtagtagcggcaacggacgccatggggaccgcctcgtcgctcgtgagccccgcgggcggggaagtgatcgaggacacgtacggggcgggcggcggcgaggcctgcgagatcccggtggaggtgaagcccaaggcccgcctgctgcgcaactcgttccgccgaggcgcgggggcggcagcaggggccgggcccgggtcgctgccccgcggggtgggcgcgggcgggctgctgggggccagcttcaagtccactggctcgtcggtgccagagctggagtacgcggcggccgagtacgagcggctcaggaaggagtacgagatctttcgcgtcagcaagaaccaggagttgttgtccatgggccgccgcgaggccaagctggacacggagaacaagcggctgcgggccgaactgcaggcacttcaaaaaacgtatcagaagatacttcgagaaaaagaaagtgctttagaagcgaaataccaagcaatggagagagcagcaacatttgaacatgacagagataaagttaaaaggcaattcaagatttttagggagaccaaagaaaatgaaattcaggacttactgagggccaagagggagttggagagcaaacttcagaggctacaggctcagggtatccaagtatttgatcctggggagtctgattcagatgacaactgtacagatgtcactgctgctggaacccaatgtgaatattggactggcggagccttgggaagtgaaccttccataggaagcatgatccagcttcagcagtccttcagaggccctgagtttgcccatagttctatagatgtggaaggaccctttgcaaatgttaatagagatgactgggatattgctgtagctagtttattacaagttactcctctgttttcacattctctgtggagtaacactgtcagatgttacctcatttatacagatgaaacccagcctgagatggatcttttccttaaggactattcacctaaacttaagagaatgtgcgagacaatgggatattttttccatgctgtttattttccaatagatgttgaaaatcaatacctcactgtaagaaaatgggaaattgagaaaagttctttagttattttatttattcacttaacattaccaagccttttattggaagactgtgaagaagcttttctgaaaaaccctgaaggaaaacctcgattaatctttcatcgtttggaagatggaaaagtcagttctgactctgtccagcaattgattgatcaagtttctaatctaaacaagaccagcaaagccaagatcattgatcactcaggagatcctgcagaaggagtatataaaacttatatttgtgtagaaaagattattaaacaggacatactgggttttgagaacacagacttggagactaaggatttgggcagtgaggattccattccagaagaagatgattttggtgatgttctgtgggacatacatgatgaacaagagcaaatggaaacttttcagcaggcttctaattcagcccatgagttgggatttgagaaatattaccaacgccttaatgatctagtggcagcaccagccccgattccacctcttctcgtgtctggaggaccaggttctgggaagtctcttcttttatcaaagtggattcaattacaacagaagaattcccccaacacactgattctttcccattttgtgggaaggcccatgtcaaccagctcagagtcctccttgattattaaacgactaactctaaagttgatgcagcactcttggtcagtctctgctctgacactggatcctgctaagcttctggaagaatttccacgttggctggaaaaactctctgctcgtcatcaaggcagcatcatcatcgttattgattctatagatcaagttcagcaagttgaaaaacacatgaaatggctgatagatccactgccagtgaatgtaagagtaattgtttctgtgaatgtagaaacatgccctccagcatggaggttgtggcctacacttcatcttgatcccttaagtccaaaagatgcaaaatctattataattgcagaatgccactctgtagacattaaattgagtaaagagcaggagaagaagctagaacgacactgtcgttctgctacaacctgcaatgccctttatgtcacccttttcggcaaaatgatcgcgcgtgctgggagagcaggcaatttagataaaatccttcatcagtgtttccagtgtcaagatactctttcattatatagacttgttctgcactctatccgggagtccatggcaaatgatgtggataaagagctaatgaagcagatcctctgccttgtcaatgttagtcacaatggtgtgagtgaatcagaactgatggaactctatcctgagatgtcctggactttcttgacctcccttattcacagtttatacaaaatgtgtttgttgacttatggatgtggcttgcttaggtttcaacatctgcaggcttgggaaacagtgagattggagtacctggaaggccccactgttacttcttcatacaggcaaaagctaatcaactatttcaccttgcagctaagtcaggacagagtgacttggagaagtgcagatgaactcccgtggctttttcagcagcagggaagtaaacagaagctgcatgattgccttcttaatctctttgtgtctcaaaacctttataaaaggggacactttgctgagttgctgagttattggcagtttgttggcaaagacaaaagtgcaatggcaacagaatacttcgattcattgaagcagtatgagaaaaactgcgaaggcgaggacaacatgagttgcttagctgatctttatgaaaccttggggcgatttctcaaggatctaggccttctcagtcaggccatagtacctttgcagaggtctttagagattcgagaaacagctttagatcccgatcacccaagagtagcccagtccctccaccaactagcaagtgtatacgtgcagtggaagaagtttggcaatgcagaacaactgtataaacaggcgttggaaatctcagaaaatgcttatggtgcggaccatccatatactgctcgtgaacttgaagcacttgcaactttgtaccagaaacaaaataaatatgaacaagctgaacattttaggaaaaaatcctttaaaattcatcagaaagctataaagaaaaaaggcaacttgtacggatttgcccttttacgtagacgggctttacagttagaagagcttacattaggtaaggacacacctgataatgctcggaccctcaatgaactgggtgttctctactatcttcaaaataacctggaaacagctgaccagtttctgaagcgttccttagaaatgagggagcgagttctaggaccagatcaccctgactgtgctcagtctttgaataatctggcagctctatgcaatgaaaagaaacagtatgataaagcagaagaactttatgaaagagctttagatattcggagacgtgcattagctcctgatcacccttctttggcatatacggtgaagcatcttgccatcttgtataagaaaatggggaaacttgacaaagctgtacctttgtatgaattggctgttgaaattcgacagaaatcttttggcccaaagcaccctagtgtagctactgccttggtgaacttagctgttctttatagccaaatgaaaaaacacgttgaagctttgccattatatgaaagagcattaaagatttatgaagatagcctgggtcggatgcatcctcgagttggagaaacactgaaaaatttagctgtgcttagctatgaaggaggagattttgaaaaagctgctgaattatacaaaagggcaatggaaataaaagaagcagaaacatcactcttgggtggaaaagctccttcacgccattcatcaagtggagacacgtttagcttaaaaacagctcattctcctaatgttttccttcagcaaggacaaaggtaatagcagcagttagaattctttgcaaatgtaccttaagacaaaataattaaacatttggaacatttgaatttgaaactttaaaaaaatgttgtacgaaattttactacgtgtgatttaactgctatttgtatgaagttgtattggattacattaagttggaattgtgattatgtctgttttagttgtttaaaagaattttcctattatatggtatccaaggatgtagacacattagaattataagaagacatgaggagcaaatcatgaagagcggattggtctttgttcaacaagagctggcagagtagttaagacaaggagttcaaaaattccatgaatcttggccaggcatggtggctcatgcctgtaatcccaccactttgggagggtgatgcaggaggatcacttgaggccaggagttggagaccagcctggccaacatggtgaaaccctgtctctactaaaaatacaaaaaaaaattagctggacctggtggcgcatgcctgtaatcctagctactcaggaggctgaggcatgagaatcgcttgaactcagcaagtggaggttgctatgagctgagattgtgccagttcattccaccctgggcaacagggtgagactctgtctcaaaaaaaaaaaaaaaaaaaaaaagaattccatgattcttttgagctctcaagagctactttagccttgccattcctcttgcttttcagcagtagtctggcccaattctctacctcaaaggaaagtttcaaggattaaagggttaatgtttatgaacgattcaaattgtcttcagtgaaacacattagtcacaagaatccctgattgctgcactttaaaaaattctttaccttttccttgagcagattggtccagtccctctgctttctgttctgtctacattgtgtattatttattactatatagtatatgtatctgcataatgtctgaagtcattaatgcagtaacaggtcaagctctttagcattctttgacttttcccaaaatatagatatgacattctcctttatcttccttcttagatggcctaaatctgtctcttcatttacctcaaactcaaattagtatgccattttcatactgaaaattaaatatttttatggattttataaatattgcaacattttagatattgttttggaccatttgtgtatttatatataataaaatcatcaatttaatacttgtaagatcctaacatgtattgattgtaaaagtgaaatatgtaatagccacacttcactgttttaaaataaaagtgcaatttcaagttaaaaaaaaaaaaaaa

SEQ ID NO: 425 - DNA, 1139 bp, Homo sapiens
gggcggggcctcggcgtggtaggcgcgctgcgtaaagaggcctgcagtcccgcggcgcggggcaggttccgggctgcttaggttggcaccggtccgtggtccccgggggcgcagtcgcagcgctcccgccctccaggcgtcagcgagtgcgcggtccagtgcggccggaacctggcgcaactcctagagcggtccttggggagacgcgggtcccagtcctgcggctcctactggggagtgcgctggtcggaagattgctggactcgctgaagagagactacgcaggaaagccccagccacccatcaaatcagagagaaggaatccaccttcttacgctatggcaggtaagaaagtactcattgtctatgcacaccaggaacccaagtctttcaacggatccttgaagaatgtggctgtagatgaactgagcaggcagggctgcaccgtcacagtgtctgatttgtatgccatgaaccttgagccgagggccacagacaaagatatcactggtactctttctaatcctgaggttttcaattatggagtggaaacccacgaagcctacaagcaaaggtctctggctagcgacatcactgatgagcagaaaaaggttcgggaggctgacctagtgatatttcagttcccgctgtactggttcagcgtgccagccatcctgaagggctggatggatagggtgctgtgccagggctttgcctttgacatcccaggattctacgattccggtttgctccagggtaaactagcgctcctttccgtaaccacgggaggcacggccgagatgtacacgaagacaggagtcaatggagattctcgatacttcctgtggccactccagcatggcacattacacttctgtggatttaaagtccttgcccctcagatcagctttgctcctgaaattgcatccgaagaagaaagaaaggggatggtggctgcgtggtcccagaggctgcagaccatctggaaggaagagcccatcccctgcacagcccactggcacttcgggcaataactctgtggcacgtgggcatcacgtaagcagcacactaggaggcccaggcgcaggcaaagagaagatggtgctgtcatgaaataaaattacaacatagctacctgg

SEQ ID NO: 426 - DNA, 3326 bp, Homo sapiens
ggccagtccgcccggcggctcgcgcacggctccgcggtcccttttgcctgtccagccggccgcctgtccctgctccctccctccgtgaggtgtccgggttcccttcgcccagctctcccacccctacccgaccccggcgcccgggctcccagagggaactgcacttcggcagagttgaatgaatgaagagagacgcggagaactcctaaggaggagattggacaggctggactccccattgcttttctaaaaatcttggaaactttgtccttcattgaattacgacactgtccacctttaatttcctcgaaaacgcctgtaactcggctgaagccatgccttgtgttcaggcgcagtatgggtcctcgcctcaaggagccagccccgcttctcagagctacagttaccactcttcgggagaatacagctccgatttcttaactccagagtttgtcaagtttagcatggacctcaccaacactgaaatcactgccaccacttctctccccagcttcagtacctttatggacaactacagcacaggctacgacgtcaagccaccttgcttgtaccaaatgcccctgtccggacagcagtcctccattaaggtagaagacattcagatgcacaactaccagcaacacagccacctgcccccccagtctgaggagatgatgccgcactccgggtcggtttactacaagccctcctcgcccccgacgcccaccaccccgggcttccaggtgcagcacagccccatgtgggacgacccgggatctctccacaacttccaccagaactacgtggccactacgcacatgatcgagcagaggaaaacgccagtctcccgcctctccctcttctcctttaagcaatcgccccctggcaccccggtgtctagttgccagatgcgcttcgacgggcccctgcacgtccccatgaacccggagcccgccggcagccaccacgtggtggacgggcagaccttcgctgtgcccaaccccattcgcaagcccgcgtccatgggcttcccgggcctgcagatcggccacgcgtctcagctgctcgacacgcaggtgccctcaccgccgtcgcggggctccccctccaacgaggggctgtgcgctgtgtgtggggacaacgcggcctgccaacactacggcgtgcgcacctgtgagggctgcaaaggcttctttaagcgcacagtgcaaaaaaatgcaaaatacgtgtgtttagcaaataaaaactgcccagtggacaagcgtcgccggaatcgctgtcagtactgccgatttcagaagtgcctggctgttgggatggtcaaagaagtggttcgcacagacagtttaaaaggccggagaggtcgtttgccctcgaaaccgaagagcccacaggagccctctcccccttcgcccccggtgagtctgatcagtgccctcgtcagggcccatgtcgactccaacccggctatgaccagcctggactattccaggttccaggcgaaccctgactatcaaatgagtggagatgacacccagcatatccagcaattctatgatctcctgactggctccatggagatcatccggggctgggcagagaagatccctggcttcgcagacctgcccaaagccgaccaagacctgctttttgaatcagctttcttagaactgtttgtccttcgattagcatacagaatatgaacatcgacatttctgccttctcctgcattgctgccctggctatggtcacagagagacacgggctcaaggaacccaagagagtggaagaactgcaaaacaagattgtaaattgtctcaaagaccacgtgactttcaacaatggggggttgaaccgccccaattatttgtccaaactgttggggaagctcccagaacttcgtaccctttgcacacaggggctacagcgcattttctacctgaaattggaagacttggtgccaccgccagcaataattgacaaacttttcctggacactttacctttctaagacctcctcccaagcacttcaaaggaactggaatgataatggaaactgtcaagagggggcaagtcacatgggcagagatagccgtgtgagcagtctcagctcaagctgccccccatttctgtaaccctcctagcccccttgatccctaaagaaaacaaacaaacaaacaaaaactgttgctatttcctaacctgcaggcagaacctgaaagggcattttggctccggggcatcctggatttagaacatggactacacacaatacagtggtataaactttttattctcagtttaaaaatcagtttgttgttcagaagaaagattgctataatgtataatgggaaatgtttggccatgcttggttgttgcagttcagacaaatgtaacacacacacacatacacacacacacacacacacagagacacatcttaaggggacccacaagtattgccctttaacaagacttcaaagttttctgctgtaaagaaagctgtaatatatagtaaaactaaatgttgcgtgggtggcatgagttgaagaaggcaaaggcttgtaaatttacccaatgcagtttggctttttaaattattttgtgcctatttatgaataaatattacaaattctaaaagataagtgtgtttgcaaaaaaaaagaaaataaatacataaaaaagggacaagcatgttgattctaggttgaaaatgttataggcacttgctacttcagtaatgtctatattatataaatagtatttcagacactatgtagtctgttagattttataaagattggtagttatctgagcttaaacattttctcaattgtaaaataggtgggcacaagtattacacatcagaaaatcctgacaaaagggacacatagtgtttgtaacaccgtccaacattccttgtttgtaagtgttgtatgtaccgttgatgttgataaaaagaaagtttatatcttgattattttgttgtctaaagctaaacaaaacttgcatgcagcagcttttgactgtttccagagtgcttataatatacataactccctggaaataactgagcactttgaattttttttatgtctaaaattgtcagttaatttattattttgtttgagtaagaattttaatattgccatattctgtagtatttttctttgtatatttctagtatggcacatgatatgagtcactgcctttttttctatggtgtatgacagttagagatgctgattttttttctgataaattctttctttgagaaagacaattttaatgtttacaacaataaaccatgtaaatgaaaaaaaaaa

SEQ ID NO: 427 - DNA, 3393 bp, Homo sapiens
ggccagtccgcccggcggctcgcgcacggctccgcggtcccttttgcctgtccagccggccgcctgtccctgctccctccctccgtgaggtgtccgggttcccttcgcccagctctcccacccctacccgaccccggcgcccgggctcccagagggaactgcacttcggcagagttgaatgaatgaagagagacgcggagaactcctaaggaggagattggacaggctggactccccattgcttttctaaaaatcttggaaactttgtccttcattgaattacgacactgtccacctttaatttcctcgaaaacgcctgtaactcggctgaagccatgccttgtgttcaggcgcagtatgggtcctcgcctcaaggagccagccccgcttctcagagctacagttaccactcttcgggagaatacagctccgatttcttaactccagagtttgtcaagtttagcatggacctcaccaacactgaaatcactgccaccacttctctccccagcttcagtacctttatggacaactacagcacaggctacgacgtcaagccaccttgcttgtaccaaatgcccctgtccggacagcagtcctccattaaggtagaagacattcagatgcacaactaccagcaacacagccacctgcccccccagtctgaggagatgatgccgcactccgggtcggtttactacaagccctcctcgcccccgacgcccaccaccccgggcttccaggtgcagcacagccccatgtgggacgacccgggatctctccacaacttccaccagaactacgtggccactacgcacatgatcgagcagaggaaaacgccagtctcccgcctctccctcttctcctttaagcaatcgccccctggcaccccggtgtctagttgccagatgcgcttcgacgggcccctgcacgtccccatgaacccggagcccgccggcagccaccacgtggtggacgggcagaccttcgctgtgcccaaccccattcgcaagcccgcgtccatgggcttcccgggcctgcagatcggccacgcgtctcagctgctcgacacgcaggtgccctcaccgccgtcgcggggctccccctccaacgaggggctgtgcgctgtgtgtggggacaacgcggcctgccaacactacggcgtgcgcacctgtgagggctgcaaaggcttctttaagcgcacagtgcaaaaaaatgcaaaatacgtgtgtttagcaaataaaaactgcccagtggacaagcgtcgccggaatcgctgtcagtactgccgatttcagaagtgcctggctgttgggatggtcaaagaagtggttcgcacagacagtttaaaaggccggagaggtcgtttgccctcgaaaccgaagagcccacaggagccctctcccccttcgcccccggtgagtctgatcagtgccctcgtcagggcccatgtcgactccaacccggctatgaccagcctggactattccaggttccaggcgaaccctgactatcaaatgagtggagatgacacccagcatatccagcaattctatgatctcctgactggctccatggagatcatccggggctgggcagagaagatccctggcttcgcagacctgcccaaagccgaccaagacctgctttttgaatcagctttcttagaactgtttgtccttcgattagcatacaggttgcaatgcgttcgtggctttggggaatggattgattccattgttgaattctcctccaacttgcagaatatgaacatcgacatttctgccttctcctgcattgctgccctggctatggtcacagagagacacgggctcaaggaacccaagagagtggaagaactgcaaaacaagattgtaaattgtctcaaagaccacgtgactttcaacaatggggggttgaaccgccccaattatttgtccaaactgttggggaagctcccagaacttcgtaccctttgcacacaggggctacagcgcattttctacctgaaattggaagacttggtgccaccgccagcaataattgacaaacttttcctggacactttacctttctaagacctcctcccaagcacttcaaaggaactggaatgataatggaaactgtcaagagggggcaagtcacatgggcagagatagccgtgtgagcagtctcagctcaagctgccccccatttctgtaaccctcctagcccccttgatccctaaagaaaacaaacaaacaaacaaaaactgttgctatttcctaacctgcaggcagaacctgaaagggcattttggctccggggcatcctggatttagaacatggactacacacaatacagtggtataaactttttattctcagtttaaaaatcagtttgttgttcagaagaaagattgctataatgtataatgggaaatgtttggccatgcttggttgttgcagttcagacaaatgtaacacacacacacatacacacacacacacacacacagagacacatcttaaggggacccacaagtattgccctttaacaagacttcaaagttttctgctgtaaagaaagctgtaatatatagtaaaactaaatgttgcgtgggtggcatgagttgaagaaggcaaaggcttgtaaatttacccaatgcagtttggctttttaaattattttgtgcctatttatgaataaatattacaaattctaaaagataagtgtgtttgcaaaaaaaaagaaaataaatacataaaaaagggacaagcatgttgattctaggttgaaaatgttataggcacttgctacttcagtaatgtctatattatataaatagtatttcagacactatgtagtctgttagattttataaagattggtagttatctgagcttaaacattttctcaattgtaaaataggtgggcacaagtattacacatcagaaaatcctgacaaaagggacacatagtgtttgtaacaccgtccaacattccttgtttgtaagtgttgtatgtaccgttgatgttgataaaaagaaagtttatatcttgattattttgttgtctaaagctaaacaaaacttgcatgcagcagcttttgactgtttccagagtgcttataatatacataactccctggaaataactgagcactttgaattttttttatgtctaaaattgtcagttaatttattattttgtttgagtaagaattttaatattgccatattctgtagtatttttctttgtatatttctagtatggcacatgatatgagtcactgcctttttttctatggtgtatgacagttagagatgctgattttttttctgataaattctttctttgagaaagacaattttaatgtttacaacaataaaccatgtaaatgaaaaaaaaaa

SEQ ID NO: 428 - DNA, 3269 bp, Homo sapiens
ggccagtccgcccggcggctcgcgcacggctccgcggtcccttttgcctgtccagccggccgcctgtccctgctccctccctccgtgaggtgtccgggttcccttcgcccagctctcccacccctacccgaccccggcgcccgggctcccagagggaactgcacttcggcagagttgaatgaatgaagacagacgcggagaactcctaaggaggagattggacaggctggactccccattgcttttctaaaaatcttggaaactttgtccttcattgaattacgacactgtccacctttaatttcctcgaaaacgcctgtaactcggctgaagcttcagtacctttatggacaactacagcacaggctacgacgtcaagccaccttgcttgtaccaaatgcccctgtccggacagcagtcctccattaaggtagaagacattcagatgcacaactaccagcaacacagccacctgcccccccagtctgaggagatgatgccgcactccgggtcggtttactacaagccctcctcgcccccgacgcccaccaccccgggcttccaggtgcagcacagccccatgtgggacgacccgggatctctccacaacttccaccagaactacgtggccactacgcacatgatcgagcagaggaaaacgccagtctcccgcctctccctcttctcctttaagcaatcgccccctggcaccccggtgtctagttgccagatgcgcttcgacgggcccctgcacgtccccatgaacccggagcccgccggcagccaccacgtggtggacgggcagaccttcgctgtgcccaaccccattcgcaagcccgcgtccatgggcttcccgggcctgcagatcggccacgcgtctcagctgctcgacacgcaggtgccctcaccgccgtcgcggggctccccctccaacgaggggctgtgcgctgtgtgtggggacaacgcggcctgccaacactacggcgtgcgcacctgtgagggctgcaaaggcttctttaagcgcacagtgcaaaaaaatgcaaaatacgtgtgtttagcaaataaaaactgcccagtggacaagcgtcgccggaatcgctgtcagtactgccgatttcagaagtgcctggctgttgggatggtcaaagaagtggttcgcacagacagtttaaaaggccggagaggtcgtttgccctcgaaaccgaagagcccacaggagccctctcccccttcgcccccggtgagtctgatcagtgccctcgtcagggcccatgtcgactccaacccggctatgaccagcctggactattccaggttccaggcgaaccctgactatcaaatgagtggagatgacacccagcatatccagcaattctatgatctcctgactggctccatggagatcatccggggctgggcagagaagatccctggcttcgcagacctgcccaaagccgaccaagacctgctttttgaatcagctttcttagaactgtttgtccttcgattagcatacaggtccaacccagtggagggtaaactcatcttttgcaatggggtggtcttgcacaggttgcaatgcgttcgtggctttggggaatggattgattccattgttgaattctcctccaacttgcagaatatgaacatcgacatttctgccttctcctgcattgctgccctggctatggtcacagagagacacgggctcaaggaacccaagagagtggaagaactgcaaaacaagattgtaaattgtctcaaagaccacgtgactttcaacaatggggggttgaaccgccccaattatttgtccaaactgttggggaagctcccagaacttcgtaccctttgcacacaggggctacagcgcattttctacctgaaattggaagacttggtgccaccgccagcaataattgacaaacttttcctggacactttacctttctaagacctcctcccaagcacttcaaaggaactggaatgataatggaaactgtcaagagggggcaagtcacatgggcagagatagccgtgtgagcagtctcagctcaagctgccccccatttctgtaaccctcctagcccccttgatccctaaagaaaacaaacaaacaaacaaaaactgttgctatttcctaacctgcaggcagaacctgaaagggcattttggctccggggcatcctggatttagaacatggactacacacaatacagtggtataaactttttattctcagtttaaaaatcagtttgttgttcagaagaaagattgctataatgtataatgggaaatgtttggccatgcttggttgttgcagttcagacaaatgtaacacacacacacatacacacacacacacacacacagagacacatcttaaggggacccacaagtattgccctttaacaagacttcaaagttttctgctgtaaagaaagctgtaatatatagtaaaactaaatgttgcgtgggtggcatgagttgaagaaggcaaaggcttgtaaatttacccaatgcagtttggctttttaaattattttgtgcctatttatgaataaatattacaaattctaaaagataagtgtgtttgcaaaaaaaaagaaaataaatacataaaaaagggacaagcatgttgattctaggttgaaaatgttataggcacttgctacttcagtaatgtctatattatataaatagtatttcagacactatgtagtctgttagattttataaagattggtagttatctgagcttaaacattttctcaattgtaaaataggtgggcacaagtattacacatcagaaaatcctgacaaaagggacacatagtgtttgtaacaccgtccaacattccttgtttgtaagtgttgtatgtaccgttgatgttgataaaaagaaagtttatatcttgattattttgttgtctaaagctaaacaaaacttgcatgcagcagcttttgactgtttccagagtgcttataatatacataactccctggaaataactgagcactttgaattttttttatgtctaaaattgtcagttaatttattattttgtttgagtaagaattttaatattgccatattctgtagtatttttctttgtatatttctagtatggcacatgatatgagtcactgcctttttttctatggtgtatgacagttagagatgctgattttttttctgataaattctttctttgagaaagacaattttaatgtttacaacaataaaccatgtaaatgaaaaaaaaaa

SEQ ID NO: 429 - DNA, 3447 bp, Homo sapiens
ggccagtccgcccggcggctcgcgcacggctccgcggtcccttttgcctgtccagccggccgcctgtccctgctccctccctccgtgaggtgtccgggttcccttcgcccagctctcccacccctacccgaccccggcgcccgggctcccagagggaactgcacttcggcagagttgaatgaatgaagagagacgcggagaactcctaaggaggagattggacaggctggactccccattgcttttctaaaaatcttggaaactttgtccttcattgaattacgacactgtccacctttaatttcctcgaaaacgcctgtaactcggctgaagccatgccttgtgttcaggcgcagtatgggtcctcgcctcaaggagccagccccgcttctcagagctacagttaccactcttcgggagaatacagctccgatttcttaactccagagtttgtcaagtttagcatggacctcaccaacactgaaatcactgccaccacttctctccccagcttcagtacctttatggacaactacagcacaggctacgacgtcaagccaccttgcttgtaccaaatgcccctgtccggacagcagtcctccattaaggtagaagacattcagatgcacaactaccagcaacacagccacctgcccccccagtctgaggagatgatgccgcactccgggtcggtttactacaagccctcctcgcccccgacgcccaccaccccgggcttccaggtgcagcacagccccatgtgggacgacccgggatctctccacaacttccaccagaactacgtggccactacgcacatgatcgagcagaggaaaacgccagtctcccgcctctccctcttctcctttaagcaatcgccccctggcaccccggtgtctagttgccagatgcgcttcgacgggcccctgcacgtccccatgaacccggagcccgccggcagccaccacgtggtggacgggcagaccttcgctgtgcccaaccccattcgcaagcccgcgtccatgggcttcccgggcctgcagatcggccacgcgtctcagctgctcgacacgcaggtgccctcaccgccgtcgcggggctccccctccaacgaggggctgtgcgctgtgtgtggggacaacgcggcctgccaacactacggcgtgcgcacctgtgagggctgcaaaggcttctttaagcgcacagtgcaaaaaaatgcaaaatacgtgtgtttagcaaataaaaactgcccagtggacaagcgtcgccggaatcgctgtcagtactgccgatttcagaagtgcctggctgttgggatggtcaaagaagtggttcgcacagacagtttaaaaggccggagaggtcgtttgccctcgaaaccgaagagcccacaggagccctctcccccttcgcccccggtgagtctgatcagtgccctcgtcagggcccatgtcgactccaacccggctatgaccagcctggactattccaggttccaggcgaaccctgactatcaaatgagtggagatgacacccagcatatccagcaattctatgatctcctgactggctccatggagatcatccggggctgggcagagaagatccctggcttcgcagacctgcccaaagccgaccaagacctgctttttgaatcagctttcttagaactgtttgtccttcgattagcatacaggtccaacccagtggagggtaaactcatcttttgcaatggggtggtcttgcacaggttgcaatgcgttcgtggctttggggaatggattgattccattgttgaattctcctccaacttgcagaatatgaacatcgacatttctgccttctcctgcattgctgccctggctatggtcacagagagacacgggctcaaggaacccaagagagtggaagaactgcaaaacaagattgtaaattgtctcaaagaccacgtgactttcaacaatggggggttgaaccgccccaattatttgtccaaactgttggggaagctcccagaacttcgtaccctttgcacacaggggctacagcgcattttctacctgaaattggaagacttggtgccaccgccagcaataattgacaaacttttcctggacactttacctttctaagacctcctcccaagcacttcaaaggaactggaatgataatggaaactgtcaagagggggcaagtcacatgggcagagatagccgtgtgagcagtctcagctcaagctgccccccatttctgtaaccctcctagcccccttgatccctaaagaaaacaaacaaacaaacaaaaactgttgctatttcctaacctgcaggcagaacctgaaagggcattttggctccggggcatcctggatttagaacatggactacacacaatacagtggtataaactttttattctcagtttaaaaatcagtttgttgttcagaagaaagattgctataatgtataatgggaaatgtttggccatgcttggttgttgcagttcagacaaatgtaacacacacacacatacacacacacacacacacacagagacacatcttaaggggacccacaagtattgccctttaacaagacttcaaagttttctgctgtaaagaaagctgtaatatatagtaaaactaaatgttgcgtgggtggcatgagttgaagaaggcaaaggcttgtaaatttacccaatgcagtttggctttttaaattattttgtgcctatttatgaataaatattacaaattctaaaagataagtgtgtttgcaaaaaaaaagaaaataaatacataaaaaagggacaagcatgttgattctaggttgaaaatgttataggcacttgctacttcagtaatgtctatattatataaatagtatttcagacactatgtagtctgttagattttataaagattggtagttatctgagcttaaacattttctcaattgtaaaataggtgggcacaagtattacacatcagaaaatcctgacaaaagggacacatagtgtttgtaacaccgtccaacattccttgtttgtaagtgttgtatgtaccgttgatgttgataaaaagaaagtttatatcttgattattttgttgtctaaagctaaacaaaacttgcatgcagcagcttttgactgtttccagagtgcttataatatacataactccctggaaataactgagcactttgaattttttttatgtctaaaattgtcagttaatttattattttgtttgagtaagaattttaatattgccatattctgtagtatttttctttgtatatttctagtatggcacatgatatgagtcactgcctttttttctatggtgtatgacagttagagatgctgattttttttctgataaattctttctttgagaaagacaattttaatgtttacaacaataaaccatgtaaatgaaaaaaaaaa

SEQ ID NO: 430 - DNA, 1612 bp, Homo sapiens
agagcggagcggtgggccgggggctggaggacaggtttgtgcgctggacgcaagcaccaggcgcagcctcgctcgccgagacccggccagaacgtgttacgagtcagtttttagtgaaaaaacattgagctaggagccaagacccatctcttcactattttggtattgtgcaagtcatcttacctctctggatctcagttgtctcatctgtaaaaaggagataaaaattatttacctgcctgaacatgaggtggaggaccatcctgctacagtattgctttctcttgattacatgtttacttactgctcttgaagctgtgcctattgacatagacaagacaaaagtacaaaatattcaccctgtggaaagtgcgaagatagaaccaccagatactggactttattatgatgaatatctcaagcaagtgattgatgtgctggaaacagataaacacttcagagaaaagctccagaaagcagacatagaggaaataaagagtgggaggctaagcaaagaactggatttagtaagtcaccatgtgaggacaaaacttgatgaactgaaaaggcaagaagtaggaaggttaagaatgttaattaaagctaagttggattcccttcaagatataggcatggaccaccaagctcttctaaaacaatttgatcacctaaaccacctgaatcctgacaagtttgaatccacagatttagatatgctaatcaaagcggcaacaagtgatctggaacactatgacaagactcgtcatgaagaatttaaaaaatatgaaatgatgaaggaacatgaaaggagagaatatttaaaaacattgaatgaagaaaagagaaaagaagaagagtctaaatttgaagaaatgaagaaaaagcatgaaaatcaccctaaagttaatcacccaggaagcaaagatcaactaaaagaggtatgggaagagactgatggattggatcctaatgactttgaccccaagacatttttcaaattacatgatgtcaatagtgatggattcctggatgaacaagaattagaagccctatttactaaagagttggagaaagtatatgaccctaaaaatgaagaggatgatatggtagaaatggaagaagaaaggcttagaatgagggaacatgtaatgaatgaggttgatactaacaaagacagattggtgactctggaggagtttttgaaagccacagaaaaaaaagaattcttggagccagatagctgggagacattagatcagcaacagttcttcacagaggaagaactaaaagaatatgaaaatattattgctttacaagaaaatgaacttaagaagaaggcagatgagcttcagaaacaaaaagaagagctacaacgtcagcatgatcaactggaggctcagaagctggaatatcatcaggtcatacagcagatggaacaaaaaaaattacaacaaggaattcctccatcagggccagctggagaattgaagtttgagccacacatttaaagtctgaagtccaccagaacttggaagaaagctgttaactcaacatctatttcatctttttagctcccttcctttttctctgctcaataaatattttaaaagca

SEQ ID NO: 431 - DNA, 1826 bp, Homo sapiens
acagagatggcactgatgcaggaactgtatagcacaccagcctccaggctggactccttcgtggctcagtggctgcagccccaccgggagtggaaggaagaggtgctagacgctgtgcggaccgtggaggagtttctgaggcaggagcatttccaggggaagcgtgggctggaccaggatgtgcgggtgctgaaggtagtcaaggtgggctccttcgggaatggcacggttctcaggagcaccagagaggtggagctggtggcgtttctgagctgtttccacagcttccaggaggcagccaagcatcacaaagatgttctgaggctgatatggaaaaccatgtggcaaagccaggacctgctggacctcgggctcgaggacctgaggatggagcagagagtccccgatgctctcgtcttcaccatccagaccagggggactgcggagcccatcacggtcaccattgtgcctgcctacagagccctggggccttctcttcccaactcccagccaccccctgaggtctatgtgagcctgatcaaggcctgcggtggtcctggaaatttctgcccatccttcagcgagctgcagagaaatttcgtgaaacatcggccaactaagctgaagagcctcctgcgcctggtgaaacactggtaccagcagtatgtgaaagccaggtcccccagagccaatctgccccctctctatgctcttgaacttctaaccatctatgcctgggaaatgggtactgaagaagacgagaatttcatgttggacgaaggcttcaccactgtgatggacctgctcctggagtatgaagtcatctgtatctactggaccaagtactacacactccacaatgcaatcattgaggattgtgtcagaaaacagctcaaaaaagagaggcccatcatcctggatccggccgaccccaccctcaacgtggcagaagggtacagatgggacatcgttgctcagagggcctcccagtgcctgaaacaggactgttgctatgacaacagggagaaccccatctccagctggaacgtgaagagggcacgagacatccacttgacagtggagcagaggggttacccagatttcaacctcatcgtgaacccttatgagcccataaggaaggttaaagagaaaatccggaggaccaggggctactctggcctgcagcgtctgtccttccaggttcctggcagtgagaggcagcttctcagcagcaggtgctccttagccaaatatgggatcttctcccacactcacatctatctgctggagaccatcccctccgagatccaggtcttcgtgaagaatcctgatggtgggagctacgcctatgccatcaaccccaacagcttcatcctgggtctgaagcagcagattgaagaccagcaggggcttcctaaaaagcagcagcagctggaattccaaggccaagtcctgcaggactggttgggtctggggatctatggcatccaagacagtgacactctcatcctctcgaagaagaaaggagaggctctgtttccagccagttagttttctctgggagacttctctgtacatttctgccatgtactccagaactcatcctgtcaatcactctgtcccattgtctactgggaaggtcccaggtcttcaccagttttacaatgagttatcccaggccagacgtggtagctcacacctgtaatcccagaactttgggaggccgaggtgggaggagcgcttgagccgaggagttcaagaccagcctgggtatcacagggagaccccgtctctacaaaataaaaaaataattcactgggaaaaaa

SEQ ID NO: 432 - DNA, 1584 bp, Homo sapiens
acagagatggcactgatgcaggaactgtatagcacaccagcctccaggctggactccttcgtggctcagtggctgcagccccaccgggagtggaaggaagaggtgctagacgctgtgcggaccgtggaggagtttctgaggcaggagcatttccaggggaagcgtgggctggaccaggatgtgcgggtgctgaaggtagtcaaggtgggctccttcgggaatggcacggttctcaggagcaccagagaggtggagctggtggcgtttctgagctgtttccacagcttccaggaggcagccaagcatcacaaagatgttctgaggctgatatggaaaaccatgtggcaaagccaggacctgctggacctcgggctcgaggacctgaggatggagcagagagtccccgatgctctcgtcttcaccatccagaccagggggactgcggagcccatcacggtcaccattgtgcctgcctacagagccctggggccttctcttcccaactcccagccaccccctgaggtctatgtgagcctgatcaaggcctgcggtggtcctggaaatttctgcccatccttcagcgagctgcagagaaatttcgtgaaacatcggccaactaagctgaagagcctcctgcgcctggtgaaacactggtaccagcaggcccatcatcctggatccggccgaccccaccctcaacgtggcagaagggtacagatgggacatcgttgctcagagggcctcccagtgcctgaaacaggactgttgctatgacaacagggagaaccccatctccagctggaacgtgaagagggcacgagacatccacttgacagtggagcagaggggttacccagatttcaacctcatcgtgaacccttatgagcccataaggaaggttaaagagaaaatccggaggaccaggggctactctggcctgcagcgtctgtccttccaggttcctggcagtgagaggcagcttctcagcagcaggtgctccttagccaaatatgggatcttctcccacactcacatctatctgctggagaccatcccctccgagatccaggtcttcgtgaagaatcctgatggtgggagctacgcctatgccatcaaccccaacagcttcatcctgggtctgaagcagcagattgaagaccagcaggggcttcctaaaaagcagcagcagctggaattccaaggccaagtcctgcaggactggttgggtctggggatctatggcatccaagacagtgacactctcatcctctcgaagaagaaaggagaggctctgtttccagccagttagttttctctgggagacttctctgtacatttctgccatgtactccagaactcatcctgtcaatcactctgtcccattgtctactgggaaggtcccaggtcttcaccagttttacaatgagttatcccaggccagacgtggtagctcacacctgtaatcccagaactttgggaggccgaggtgggaggagcgcttgagccgaggagttcaagaccagcctgggtatcacagggagaccccgtctctacaaaataaaaaaataattcactgggaaaaaa

SEQ ID NO: 433 - DNA, 1212 bp, Homo sapiens
tgcttccccgccggccgccgccctcctccccgggagagagcgaggcgcgcgggtccctctgcgccacccccgcccccgccccttccgagcaaacttttggcacccaccgcagcccagcgcgcgttcgtgctccgcagggcgcgcctctctccgccaatgccaggcgcgcgggggagccattaggaggcgaggagagaggagggcgcagctcccgcccagcccagccctgcccagccctgcccggaggcagacgcgccggaaccgggacgcgataaatatgcagagcggaggcttcgcgcagcagagcccgcgcgccgcccgctccgggtgctgaatccaggcgtggggacacgagccaggcgccgccgccggagccagcggagccggggccagagccggagcgcgtccgcgtccacgcagccgccggccggccagcacccagggccctgcatgccaggtcgttggaggtggcagcgagacatgcacccggcccggaagctcctcagcctcctcttcctcatcctgatgggcactgaactcactcaagtgctgcccaccaaccctgaggagagctggcaggtgtacagctctgcccaggacagcgagggcaggtgtatctgcacagtggtcgctccacagcagaccatgtgttcacgggatgcccgcacaaaacagctgaggcagctactggagaaggtgcagaacatgtctcaatccatagaggtcttggacaggcggacccagagagacttgcagtacgtggagaagatggagaaccaaatgaaaggactggagtccaagttcaaacaggtggaggagagtcataagcaacacctggccaggcagtttaagggctaacttaaaagagttttttcaatgctgcagtgactgaagaagcagtccactcccatgtaaccatgaaagagagccagagagctttttgcaccatgcatttttactattattttccaatacttagcaccatttcactaaggaaccttgaatacaaccaggatcctcctttgcatgcgactgtagctgcatttcatgaatagtttgaacccttgtcaatgcattttttgaaaaagaaagaaaaaaaaaacttcgtgtatgtgactcaaagcatgtaaccttaagatgttgcattctaaactgacaataaagacctttcccaaataaaaaaaaaaaaaaaaaaaaaaaaaaaaaaaaaaa

SEQ ID NO: 434 - DNA, 1852 bp, Homo sapiens
caggagagaaggcaccgcccccaccccgcctccaaagctaaccctcgggcttgaggggaagaggctgactgtacgttccttctactctggcaccactctccaggctgccatggggcccagcacccctctcctcatcttgttccttttgtcatggtcgggacccctccaaggacagcagcaccaccttgtggagtacatggaacgccgactagctgctttagaggaacggctggcccagtgccaggaccagagtagtcggcatgctgctgagctgcgggacttcaagaacaagatgctgccactgctggaggtggcagagaaggagcgggaggcactcagaactgaggccgacaccatctccgggagagtggatcgtctggagcgggaggtagactatctggagacccagaacccagctctgccctgtgtagagtttgatgagaaggtgactggaggccctgggaccaaaggcaagggaagaaggaatgagaagtacgatatggtgacagactgtggctacacaatctctcaagtgagatcaatgaagattctgaagcgatttggtggcccagctggtctatggaccaaggatccactggggcaaacagagaagatctacgtgttagatgggacacagaatgacacagcctttgtcttcccaaggctgcgtgacttcacccttgccatggctgcccggaaagcttcccgagtccgggtgcccttcccctgggtaggcacagggcagctggtatatggtggctttctttattttgctcggaggcctcctggaagacctggtggaggtggtgagatggagaacactttgcagctaatcaaattccacctggcaaaccgaacagtggtggacagctcagtattcccagcagaggggctgatccccccctacggcttgacagcagacacctacatcgacctggcagctgatgaggaaggtctttgggctgtctatgccacccgggaggatgacaggcacttgtgtctggccaagttagatccacagacactggacacagagcagcagtgggacacaccatgtcccagagagaatgctgaggctgcctttgtcatctgtgggaccctctatgtcgtctataacacccgtcctgccagtcgggcccgcatccagtgctcctttgatgccagcggcaccctgacccctgaacgggcagcactcccttattttccccgcagatatggtgcccatgccagcctccgctataacccccgagaacgccagctctatgcctgggatgatggctaccagattgtctataagctggagatgaggaagaaagaggaggaggtttgaggagctagccttgttttttgcatctttctcactcccatacatttatattatatccccactaaatttcttgttcctcattcttcaaatgtgggccagttgtggctcaaatcctctatatttttagccaatggcaatcaaattctttcagctcctttgtttcatacggaactccagatcctgagtaatccttttagagcccgaagagtcaaaaccctcaatgttccctcctgctctcctgccccatgtcaacaaatttcaggctaaggatgccccagacccagggctctaaccttgtatgcgggcaggcccagggagcaggcagcagtgttcttcccctcagagtgacttggggagggagaaataggaggagacgtccagctctgtcctctcttcctcactcctcccttcagtgtcctgaggaacaggactttctccacattgttttgtattgcaacattttgcattaaaaggaaaatccactgctaaaaaaaaaaaaaaaaaaaaaaaaaaaaaaaaaaaaaa

SEQ ID NO: 435 - DNA, 4171 bp, Homo sapiens
gggccgcctctgcacgtccgccccggagcccgcacccgcgccccacgcgccgccgaggactcggcccggctcgtggagcccttcgcccgcggcgtgagtacccccgacccgcccgtccccgctctgctcgcgccctgccgctgcgccgccctcggtggcttttccgacgggcgagccccgtgctgtgcgggaaagaatccgacaacttcgcagcccatcccggctggacgcgaccgggagtgcagcagcccgttcccctcctcggtgccgcctctgcccagcgtttgcttggctgggctaccacctgcgctcggacggcgctcggagggtcctcgcccccggcctgcctacctgaaaaccagaactgatggctctatttgcagtctttcagacaacattcttcttaacattgctgtccttgaggacttaccagagtgaagtcttggctgaacgtttaccattgactcctgtatcacttaaagtttccaccaattctacgcgtcagagtttgcacttacaatggactgtccacaaccttccttatcatcaggaattgaaaatggtatttcagatccagatcagtaggattgaaacatccaatgtcatctgggtggggaattacagcaccactgtgaagtggaaccaggttctgcattggagctgggaatctgagctccctttggaatgtgccacacactttgtaagaataaagagtttggtggacgatgccaagttccctgagccaaatttctggagcaactggagttcctgggaggaagtcagtgtacaagattctactggacaggatatattgttcgttttccctaaagataagctggtggaagaaggcaccaatgttaccatttgttacgtttctaggaacattcaaaataatgtatcctgttatttggaagggaaacagattcatggagaacaacttgatccacatgtaactgcattcaacttgaatagtgtgcctttcattaggaataaagggacaaatatctattgtgaggcaagtcaaggaaatgtcagtgaaggcatgaaaggcatcgttctttttgtctcaaaagtacttgaggagcccaaggacttttcttgtgaaaccgaggacttcaagactttgcactgtacttgggatcctgggacggacactgccttggggtggtctaaacaaccttcccaaagctacactttatttgaatcattttctggggaaaagaaactttgtacacacaaaaactggtgtaattggcaaataactcaagactcacaagaaacctataacttcacactcatagctgaaaattacttaaggaagagaagtgtcaatatcctttttaacctgactcatcgagtttatttaatgaatccttttagtgtcaactttgaaaatgtaaatgccacaaatgccatcatgacctggaaggtgcactccataaggaataatttcacatatttgtgtcagattgaactccatggtgaaggaaaaatgatgcaatacaatgtttccatcaaggtgaacggtgagtacttcttaagtgaactggaacctgccacagagtacatggcgcgagtacggtgtgctgatgccagccacttctggaaatggagtgaatggagtggtcagaacttcaccacacttgaagctgctccctcagaggcccctgatgtctggagaattgtgagcttggagccaggaaatcatactgtgaccttattctggaagccattatcaaaactgcatgccaatggaaagatcctgttctataatgtagttgtagaaaacctagacaaaccatccagttcagagctccattccattccagcaccagccaacagcacaaaactaatccttgacaggtgttcctaccaaatctgcgtcatagccaacaacagtgtgggtgcttctcctgcttctgtaatagtcatctctgcagaccccgaaaacaaagaggttgaggaagaaagaattgcaggcacagagggtggattctctctgtcttggaaaccccaacctggagatgttataggctatgttgtggactggtgtgaccatacccaggatgtgctcggtgatttccagtggaagaatgtaggtcccaataccacaagcacagtcattagcacagatgcttttaggccaggagttcgatatgacttcagaatttatgggttatctacaaaaaggattgcttgtttattagagaaaaaaacaggatactctcaggaacttgctccttcagacaaccctcacgtgctggtggatacattgacatcccactccttcactctgagttggaaagattactctactgaatctcaacctggttttatacaagggtaccatgtctatctgaaatccaaggcgaggcagtgccacccacgatttgaaaaggcagttctttcagatggttcagaatgttgcaaatacaaaattgacaacccggaagaaaaggcattgattgtggacaacctaaagccagaatccttctatgagtttttcatcactccattcactagtgctggtgaaggccccagtgctacgttcacgaaggtcacgactccggatgaacactcctcgatgctgattcatatcctactgcccatggttttctgcgtcttgctcatcatggtcatgtgctacttgaaaagtcagtggatcaaggagacctgttatcctgacatccctgacccttacaagagcagcatcctgtcattaataaaattcaaggagaaccctcacctaataataatgaatgtcagtgactgtatcccagatgctattgaagttgtaagcaagccagaagggacaaagatacagttcctaggcactaggaagtcactcacagaaaccgagttgactaagcctaactacctttatctccttccaacagaaaagaatcactctggccctggcccctgcatctgttttgagaacttgacctataaccaggcagcttctgactctggctcttgtggccatgttccagtatccccaaaagccccaagtatgctgggactaatgacctcacctgaaaatgtactaaaggcactagaaaaaaactacatgaactccctgggagaaatcccagctggagaaacaagtttgaattatgtgtcccagttggcttcacccatgtttggagacaaggacagtctcccaacaaacccagtagaggcaccacactgttcagagtataaaatgcaaatggcagtctccctgcgtcttgccttgcctcccccgaccgagaatagcagcctctcctcaattacccttttagatccaggtgaacactactgctaaccagcatgccgatttcataccttatgctacacagacattaagaagagcagagctggcaccctgtcatcaccagtggccttggtccttaatcccagtacaatttgcaggtctggtttatataagaccactacagtctggctaggttaaaggccagaggctatggaacttaacactccccattggagcaagcttgccctagagacggcaggatcatgggagcatgcttaccttctgctgtttgttccaggctcacctttagaacaggagacttgagcttgacctaaggatatgcattaaccactctacagactcccactcagtactgtacagggtggctgtggtcctagaagttcagtttttactgaggaaatatttccattaacagcaattattatattgaaggctttaataaaggccacaggagacattactatagcatagattgtcaaatgtaaatttactgagcgtgttttataaaaaactcacaggtgtttgaggccaaaacagattttagacttaccttgaacggataagaatctatagttcactgacacagtaaaattaactctgtgggtgggggcggggggcatagctctaatctaatatataaaatgtgtgatgaatcaacaagatttccacaattcttctgtcaagcttactacagtgaaagaatgggattggcaagtaacttctgacttactgtcagttgtacttctgctccatagacatcagtattctgccatcatttttgatgactacctcagaacataaaaaggaacgtatatcacataattccagtcacagtttttggttcctcttttctttcaagaactatatataaatgacctgttttcacgcggccgc

SEQ ID NO: 436 - DNA, 6621 bp, Homo sapiens
atgggtgcccctccagctctctatggcgtctgctcgccgagccccgcaaaagaggcggggattccatcatgtgaccggggtgctgggcgccggcgcaggcgcggttgctgcgtagtcgtcgccgggctccgttgcccgcgctgttttaccttcccaacgcttgaggcggacgctggggggtcctgcgcctttccctcctgccgctggggactgcaggctaaggccatgtcccgaaagcaggcggcgaagagccggccgggcagcggcagccggaaagccgaggccgagcgcaagcgggacgagcgggcggcgcgccgggccctggccaaggagcggcggaatcggccggagtctggcggcggcggcggctgcgaggaggagttcgtcagcttcgccaaccagctgcaggccctggggctgaagctgcgggaggtgccgggggacggcaattgcttgttcagagctcttggtgatcaattggagggacactcacgaaatcatctcaagcacagacaggagacagtggactacatgataaagcagcgggaagattttgaaccctttgtagaagatgacattccttttgagaagcatgtggccagtttggcaaagcctggtacttttgctggcaatgatgcaattgtagcctttgcaagaaatcatcagttgaatgtagtgattcatcaacttaatgcccctttgtggcagattcgtggtacagagaaaagcagcgtgagggagttacacatcgcatatcggtatggagagcactacgacagtgttcggaggatcaatgacaactcagaggcacctgcacatctccagacggattttcagatgcttcatcaagatgaatcaaataaaagagaaaagatcaagacaaagggaatggactctgaagacgacctgagagatgaagtagaggatgctgtccagaaagtttgtaatgcaactggatgttcagattttaatttaatagtccagaacctggaagctgaaaattataatattgaatctgcaataattgccgtgcttcggatgaaccaagggaagagaaataatgcagaagagaatcttgagcccagtggtcgagtgctgaagcagtgtggccctttgtgggaggagggtggcagtggtgccagaatctttggaaatcagggcttaaatgaaggcaggaccgaaaacaataaggcacaggccagccctagtgaagaaaacaaagcaaataaaaaccagctcgcaaaggtcacaaacaaacagaggcgagaacagcagtggatggagaagaagaagcggcaggaggagaggcaccgccacaaagccctggagagcagaggtagccacagggacaataacagaagcgaagcagaggcgaacacgcaggtcaccttggtgaagaccttcgccgctctcaacatctgactctttggcctcttgggagttgtaagaagcggctggaaaaggattgctgtgtgctagactttccagtgaggccgtccttttataaaacgcaacacaaccaacgaagcccacacatgagctcacacactgagttagtttcgttcaagctgcctctttttttgttcgaagttttattagtgatatgttggtgttttatgaaaatgcagtgaggccattcatattctgtaatacaaaattaaaatactgagttttaggggcagatagttaggtcaggaaaaaccttttaagtggtggctttatttgccctgaaaatcagacttcagtgaccctaggatctttccttaacatttggggtgagttttgctgtaattgttcatgagtagtttagaataattgttagaaattcagaatgacaagtttccttagtttctctttcattctcaaacagatatatagggtagcttataaatgatctccaactcaggaatatgctttgatttacttctaatccaagttactcagaaaataattcaggaattgttttcccaaagttacgtgagggttgtggcctgcagtcaggatggaaattaaccgcatttctctccttcctgattctgatgttatttcagatgggatgcaggtgctgttagttcatttgcactcaagccatatgataaatgcagctgactgttaattaggcctggccttgttgggaagttgatagtggtgttgggtttttggtatttgtttcctgacagtggggagatggcatgttactgcttgtgatacagttctggaattctgatagtgtgtagagcagggtctatagttgtaacaggagacgaactcctggggttttgcctaagaggagtctaaagaattatgtttttataggagaagcctggaagaataaggtttttcatgttcgcattttaaataacgattttcttcccttctgttgtagacttagatgccttcagagagatacgtggtaacttgaccttataggtcgctaaacttagtattgtggaaattaaatcttataaaatgctacatttatttctttttatttaagccctgtttggcatttcaaagttgggaaaactccagcatctgctggaagttgttggaccagcagggttggttgacttaggttggaccagcagagaagagaacatactttggttgaggccttcgaatcactcttcagttctgaaatagacagacttgagcagtggagagacgtctttcctaaaactgagttaggtggatgtgaacttaagaactataacgtatgaggcagcccatcttggatcatctttgtcttttgggacctaatacttgggcaaataattgatgctgagttgaaaggtaaattattagttatcttccccacccctcgcatttcagaattataaaaattcggaggcaaattgaaaactaaaatgtttggtaggccctggagtcgccagattgtctttatcaccaggcctttggctttcttcagtttcactggtatcttttggttttgtttttgactttggtggctttttgtagttggagcatcagtagtctcttggaattgctcctaggacattgtggtttaggtttcttcctgggtacagtacattgtaaaatttagcagattaaaaaaagtacacagcattttttttctgtgcacgtcgcagagtcctgagcttgaggctgtgttactctactcattccaaacgaatgaaagatctctgttgccttactctaaggaagtgggatcgagtgcgttaggatctatggttgtcttggttttcaactctgggcagattcctgactggctgagtgtttctgaatgaagatgttttcctgtctgttttgtactgcttgagtgcagaggccagatcctctcagaaagataagattgtatgccagaaattcagattagcagtcagcttaagagagacttattgtcagaagtagtagaattgctttatttacttggttaatgaaggtggccttgggccctattgggttttagaagttttagaagctgctaaaaagttattaaagaatattgggaacatttattttttaaattacctaattctggtaataggcttcagcatttctggagtataataatggtggtttaaaaaactaatcaaacggctttagtaattttactactggtttcacagcttttcagttacagttggtctgtttagtgtgttaattattaggaatcgggtacatgcatccaacttcagtgataccttctagctaatggtttcaatttagacttcactgcctcagtctcactgggtacatgagaaggttggaatcaacatgcttagttgcctcagtgggcacttgaaaattccttcactggcagcccgagtggaggcccagtatgtctagtcctgggatgactgttgtcagcagctgttactctagtacaggtgctcctgtgaactctttattaggaactgaatgtgtcttaacctctgtgttacatcttggctggcagagatttatgttacatgagattgtcttggtagcttgtagtgtggtcaggagaaaggggatggagcagtggtgcatagctgcttactgctcttataaacggtatataaaggttttacggattttgaaaatatttttttttagaggtcaaaataaataccattttagtggcaacagctttgaactagagaggtagatgtattaaagcagcatagaaccataacttctagataatgtagttgccactaggagatattagaaagttagaatgtatgtgtgtatttagtttttcaataataatgaacatacactttcaggagcaaagtatggttgagaaattgtggcagaaagaattttaaatgttagtcgaagttgtctgtagtttctttattaagctctgaaaacacttccaatgccagtttgattctgagggcttgggaagtgggatctcccttgtggagcagctggagctggctgggagggagcctctccatgggtaatttattatgcctgccctgcttcccccagggagctgcttcagtgtgaaatgatgtgattgtcgggggtggggtgggaggagggccaccttcagtcggggagttgctcacatattacacaggtagcatcaggtggacttcagcgctgaactgtactagtagtgagtccctgtagtcaatgtgcaatttctctaattctgagaaactctgtagactctgcctgggttttactgggtcagcatagaatgctatcagtttacctctgtgaaatattcagtcagttgaaggaaacttggattcctagtcagaggtgactaaaagttaccctgaccaaaaggatctctgcggggggaagagaatggagcttcctgattttaatgtgttgcgtcagtggccctcttcgactcccgttttgggtagatgcgtagctcttcactttcttacctcaaggctctgtctagccatgttaaatctttagactcagtctgatgccgtttttctgttttgccattctcattattcacagctttcagaacaagtgttgctaaaactccggggcctttgacagttgttctgaggtgatttaataatggactttttataagttatgttttcctggctctaaagtaaatttttttttttttttttttgagacagagtcttgctttgttgcccaggctggagtgtggtggggcaatctcggctcactgcaacctccacctcccgggttcaagcgattctcctgcctcagcctcctgagtagctgggattacaggtgtgtgccaccatgcttggctaatttttgtatttttagtagagacggggtttcaccatgttagccaggctggtctcaaactcctgaccttgtgatctgcccgcctcagcctcccaaagtgctaggattacgggtgtgagcaaccctgcccggccagtaaattgtatttttttaatgacatcattgatttgaagatctagatggcataaattacgacgtctgccatcgcatattagaaaggggacagtcatatttgtaacgtggagagaacacggagcaccagtcaccacgtgcacttaggatgcagagcttaccgcacaccgctgatggggacctccggaaagagcggtgccttgtggttggcctggaagttctctcccaaggtgaaattcctttaaaacctcaggctctgacctatgtctttgaagcagctgctttgtagagtccctctctttactgtcctcgttaggactgttttgtggttccatgaaaatgtttagcatccttgcagaattacttgagaaggggctggtaccagtgtaaagaatctatttctgtaaaactacgaacttttgcatagggaatttattctaagcaggtcatagccgtgatccagagctgctgctgctcactgccagtccttgcggctggcggcgattgccggacagactctctgtggcctggctctcatccttggcgtgtcagcctgcggcaggctgccagccatccatgacaatcatgtgagctcagccacagacctcagctggcggtttgatccctggcaggtccctcgagcagtactggtaagaggcttcacacattttcccactcttacagttcatttttcatagtaggaagggcccttggcctccccagtgcctcttccagagcctccaccagcactaagctcagaggaaagaagaaaagggccaggagtcagacgtcacacccgggggctcccctttcccatgtagaagtgttggcatgcgtcagtctcctttacagaggggtggatgtatccgtggaggaggggccttctctctttctaattgcactatacttgttctagcttcagtctggagatacttaagacctccatggggtcgtgatccatagacttagcaagtcttgccttatctatggagctcgatggtgagaattgtgaccattgtctgatgtccatagttccttccccctagattgtttctttccacggattgtgttcatctgaaccattttattttttatttaccaaagtactgtacttggctatttgcagtgttttcaaaaccaaatgtttctttttttgtgtttttaatcttcgatacttggtgcaatagaagctgcaaagatgtgccactttatctatgaaatggagttttgtataccaataaattctagtttaaaaacaaa

SEQ ID NO: 437 - DNA, 2767 bp, Homo sapiens
tcatttgtaggctgaactaatgactgccgccataagaagacagagagaactgagtatcctcccaaaggtgacactggaagcaatgaacaccacagtgatgcaaggcttcaacagatctgagcggtgccccagagacactcggatagtacagctggtattcccagccctctacacagtggttttcttgaccggcatcctgctgaatactttggctctgtgggtgtttgttcacatccccagctcctccaccttcatcatctacctcaaaaacactttggtggccgacttgataatgacactcatgcttcctttcaaaatcctctctgactcacacctggcaccctggcagctcagagcttttgtgtgtcgtttttcttcggtgatattttatgagaccatgtatgtgggcatcgtgctgttagggctcatagcctttgacagattcctcaagatcatcagacctttgagaaatatttttctaaaaaaacctgtttttgcaaaaacggtctcaatcttcatctggttctttttgttcttcatctccctgccaaatacgatcttgagcaacaaggaagcaacaccatcgtctgtgaaaaagtgtgcttccttaaaggggcctctggggctgaaatggcatcaaatggtaaataacatatgccagtttattttctggactgtttttatcctaatgcttgtgttttatgtggttattgcaaaaaaagtatatgattcttatagaaagtccaaaagtaaggacagaaaaaacaacaaaaagctggaaggcaaagtatttgttgtcgtggctgtcttctttgtgtgttttgctccatttcattttgccagagttccatatactcacagtcaaaccaacaataagactgactgtagactgcaaaatcaactgtttattgctaaagaaacaactctctttttggcagcaactaacatttgtatggatcccttaatatacatattcttatgtaaaaaattcacagaaaagctaccatgtatgcaagggagaaagaccacagcatcaagccaagaaaatcatagcagtcagacagacaacataaccttaggctgacaactgtacatagggttaacttctatttattgatgagacttccgtagataatgtggaaatcaaatttaaccaagaaaaaaagattggaacaaatgctctcttacattttattatcctcgtgtacagaaaagattatataaaatttaaatccacatagatctattcataagctgaatgaaccattactaagagaatgcaacaggatacaaatggccactagaggtcattatttctttctttctttttttttttttttaatttcaagagcatttcactttaacattttggaaaagactaaggagaaacgtatatccctacaaacctcccctccaaacaccttctcacattcttttccacaattcacataacactactgcttttgtgccccttaaatgtagatatgtgctgaaagaaaaaaaaaacgcccaactcttgaagtccattgctgaaaactgcagccaggggttgaaagggatgcagacttgaagagtctgaggaactgaagtgggtcagcaagacctctgaaatcctgggtaaaggattttctccttacaattacaaacagcctctttcacattacaataatataccataggaggcacaagcaccattattaagccactttgcttacaccttaagtgtgtacaattcaagtgtgagaatgctgtgttaactattctttggaattctccttctgtccagcaaatactctaatgatggttaaacatggcacctactcagcaatgccttcctggaccacaacccctatccccctgccccaccctcctcattaaaaacaaatacttctactgtttgggtgtgtgatagggttctcaatgcagatctcccttttctagttagctatattcttgactgcatccgctaaaaatgttaaagcttcttgagagacagacatgccagattttcttggtatctcccataatacgacctacagtccatggtctacagatgttttaaatagaattgctattctcgatacatacaaagacgtaattgctgacccacaatcagtaacatccatattgagagatttttcaaaggatggtgaccctgcttgtatttatttaccttggtattttttcttgcatccttctgtgattcaaaaaagtaaaatgtggctttctgaaatgatggataagagtctacatcttctagaaaaaatacataaaggagtagttaagctctgtaaatgtgccacgagctccaacacgaccatcgtagggtgaagcccacgttttcttccatggcctcaaaggccctagaacttgcctacctttctggccttacctcctagctacttatccatctcttgaactttatactcttgtataaatttctaactttcagaaaatgccatactctgttttggcaccacacatgtatatttccccctggtacacttggaagactcttatccatctgtgaaaccctatgttgtcatcacttggtccatgaaatattacctggccaatatcccaccatcacctcaaacccaatcaccccctcctctgtatgctgtcacacctatattattaaacttatcacattgcattgtaattacttcctgacctttgtatctactcttttagtaactgatgtatatatctgaaaggagagattgtttcattgtgcaatcaataaatgtttgataaaataaagccc

SEQ ID NO: 438 - DNA, 2858 bp, Homo sapiens
aacagtattttccttttcaacacatctattgaaagtgttggataaatgcaggatgttaatatgctataaacataaagtctgtttttaaaaaatagcatttgaaaatcatgaagggctttttgttttcttttgtttgtatatatgtttattggtaacaggtgacactggaagcaatgaacaccacagtgatgcaaggcttcaacagatctgagcggtgccccagagacactcggatagtacagctggtattcccagccctctacacagtggttttcttgaccggcatcctgctgaatactttggctctgtgggtgtttgttcacatccccagctcctccaccttcatcatctacctcaaaaacactttggtggccgacttgataatgacactcatgcttcctttcaaaatcctctctgactcacacctggcaccctggcagctcagagcttttgtgtgtcgtttttcttcggtgatattttatgagaccatgtatgtgggcatcgtgctgttagggctcatagcctttgacagattcctcaagatcatcagacctttgagaaatatttttctaaaaaaacctgtttttgcaaaaacggtctcaatcttcatctggttctttttgttcttcatctccctgccaaatacgatcttgagcaacaaggaagcaacaccatcgtctgtgaaaaagtgtgcttccttaaaggggcctctggggctgaaatggcatcaaatggtaaataacatatgccagtttattttctggactgtttttatcctaatgcttgtgttttatgtggttattgcaaaaaaagtatatgattcttatagaaagtccaaaagtaaggacagaaaaaacaacaaaaagctggaaggcaaagtatttgttgtcgtggctgtcttctttgtgtgttttgctccatttcattttgccagagttccatatactcacagtcaaaccaacaataagactgactgtagactgcaaaatcaactgtttattgctaaagaaacaactctctttttggcagcaactaacatttgtatggatcccttaatatacatattcttatgtaaaaaattcacagaaaagctaccatgtatgcaagggagaaagaccacagcatcaagccaagaaaatcatagcagtcagacagacaacataaccttaggctgacaactgtacatagggttaacttctatttattgatgagacttccgtagataatgtggaaatcaaatttaaccaagaaaaaaagattggaacaaatgctctcttacattttattatcctcgtgtacagaaaagattatataaaatttaaatccacatagatctattcataagctgaatgaaccattactaagagaatgcaacaggatacaaatggccactagaggtcattatttctttctttctttttttttttttttaatttcaagagcatttcactttaacattttggaaaagactaaggagaaacgtatatccctacaaacctcccctccaaacaccttctcacattcttttccacaattcacataacactactgcttttgtgccccttaaatgtagatatgtgctgaaagaaaaaaaaaacgcccaactcttgaagtccattgctgaaaactgcagccaggggttgaaagggatgcagacttgaagagtctgaggaactgaagtgggtcagcaagacctctgaaatcctgggtaaaggattttctccttacaattacaaacagcctctttcacattacaataatataccataggaggcacaagcaccattattaagccactttgcttacaccttaagtgtgtacaattcaagtgtgagaatgctgtgttaactattctttggaattctccttctgtccagcaaatactctaatgatggttaaacatggcacctactcagcaatgccttcctggaccacaacccctatccccctgccccaccctcctcattaaaaacaaatacttctactgtttgggtgtgtgatagggttctcaatgcagatctcccttttctagttagctatattcttgactgcatccgctaaaaatgttaaagcttcttgagagacagacatgccagattttcttggtatctcccataatacgacctacagtccatggtctacagatgttttaaatagaattgctattctcgatacatacaaagacgtaattgctgacccacaatcagtaacatccatattgagagatttttcaaaggatggtgaccctgcttgtatttatttaccttggtattttttcttgcatccttctgtgattcaaaaaagtaaaatgtggctttctgaaatgatggataagagtctacatcttctagaaaaaatacataaaggagtagttaagctctgtaaatgtgccacgagctccaacacgaccatcgtagggtgaagcccacgttttcttccatggcctcaaaggccctagaacttgcctacctttctggccttacctcctagctacttatccatctcttgaactttatactcttgtataaatttctaactttcagaaaatgccatactctgttttggcaccacacatgtatatttccccctggtacacttggaagactcttatccatctgtgaaaccctatgttgtcatcacttggtccatgaaatattacctggccaatatcccaccatcacctcaaacccaatcaccccctcctctgtatgctgtcacacctatattattaaacttatcacattgcattgtaattacttcctgacctttgtatctactcttttagtaactgatgtatatatctgaaaggagagattgtttcattgtgcaatcaataaatgtttgataaaataaagccc

SEQ ID NO: 439 - DNA, 3960 bp, Homo sapiens
gttctgaatgatgactgacgcgggtttgggtgatacccctcacagcccctgtcattccggagtcataaggcacccgcgcgtctagccccagcgccagggcacgcgagcggcgctggagggaggaaagcttccgcctgcgggccggacaaaagtcccgcctgcccacggctttttgcccgccgctcgtgaccgagacgcctcgccgcggccagctcgctgctctcgctggcggatggtgtgtggccgccgcaggacgcccgccgtgcccgggccatgaagtagcggctgctggcggcgccgctgcccaaccgccagccccagccccgcgctgcgctgcccggtcctctcccggcggggtcgtatcggcgtggacatggctggccgcgtccctagcctgctagttctccttgtttttccaagcagctgtttggctttccgaagcccactttctgtctttaagaggtttaaagaaactaccagaccattttccaatgaatgtcttggtaccaccagacccgtagttcctattgattcatcagattttgcattggatattcgcatgcctggggttacacctaaacagtccgatacatacttctgcatgtctatgcgaataccagtggatgaggaagccttcgtgattgacttcaagcctcgagccagcatggatactgtccatcacatgttactttttggatgcaatatgccttcatccactggaagttactggttttgtgatgaaggaacctgtacagataaagccaatattctgtatgcctgggcgagaaatgctccccctacccggctccccaaaggtgttggattcagagttggaggagagactggaagtaaatactttgtactacaggtacactatggggatattagtgcttttagagataataacaaggactgttctggtgtgtccttacacctcacacgtctgccacagcctttaattgctggcatgtaccttatgatgtctgttgacactgttatcccagcaggagaaaaagtggtgaattctgacatttcatgccattataaaaattatccaatgcatgtctttgcctatagagttcacactcaccatttaggtaaggtagtaagtggatacagagtaagaaatggacagtggacactgattggacggcagagccctcagctgccacaggctttctaccctgtggggcatccagttgatgtaagttttggtgacctactggctgcaagatgtgtattcactggtgaaggaaggacagaagccacacacattggtggcacgtctagtgatgaaatgtgcaacttatacattatgtattacatggaagccaagcatgcagtttctttcatgacctgtacccagaatgtagctccagatatgttcagaaccataccaccagaggccaacattccaattcccgtgaagtctgatatggttatgatgcatgaacatcataaagaaacagaatataaagataagattcctttactacagcagccaaaacgagaagaagaagaagtgttagaccagggtgatttctattcactactttccaagctgctaggagaaagggaagatgttgttcatgtgcacaaatataatcctacagaaaaggcagaatcagagtcagacctggtagctgagattgcaaatgtagtccaaaaaaaggatcttggtcgatctgatgccagagagggtgcagaacatgagaggggtaatgctattcttgtcagagacagaattcacaaattccacagactagtatctaccttgaggccaccagagagcagagttttctcattacagcagcccccacctggtgaaggcacctgggaaccagaacacacaggagatttccacatggaagaggcactggattggcctggagtatacttgttaccaggccaggtttctggggtggctctagaccctaagaataacctggtgattttccacagaggtgaccatgtctgggatggaaactcgtttgacagcaagtttgtttaccagcaaataggactcggaccaattgaagaagacactattcttgtcatagatccaaataatgctgcagtactccagtccagtggaaaaaatctgttttacttgccacatggcttgagtatagataaagatgggaattattgggtcacagacgtggctctccatcaggtgttcaaactggatccaaacaataaagaaggccctgtattaatcctgggaaggagcatgcaaccaggcagtgaccagaatcacttctgtcaacccactgatgtggctgtggatccaggcactggagccatttatgtatcagatggttactgcaacagcaggattgtgcagttttcaccaagtggaaagttcatcacacagtggggagaagagtcttcagggagcagtcctctgccaggccagttcactgttcctcacagcttggctcttgtgcctcttttgggccaattatgtgtggcagaccgggaaaatggtcggatccagtgttttaaaactgacaccaaagaatttgtgagagagattaagcattcatcatttggaagaaatgtatttgcaatttcatatataccaggcttgctctttgcagtgaatgggaagcctcattttggggaccaagaacctgtacaaggatttgtgatgaacttttccaatggggaaattatagacatcttcaagccagtgcgcaagcactttgatatgcctcatgatattgttgcatctgaagatgggactgtgtacattggagatgctcataccaacaccgtgtggaagttcaccttgactgagaaattggaacatcgatcagttaaaaaggctggcattgaggtccaggaaatcaaagaagccgaggcagttgttgaaaccaaaatggagaacaaacccacctcctcagaattgcagaagatgcaagagaaacagaaactgatcaaagagccaggctcgggagtgcctgttgttctcattacaacccttctggttattccggtggttgtcctgctggccattgccatatttattcggtggaaaaaatcaagggcctttggagcagattctgaacacaaactcgagacgagttcaggaagagtactgggaagatttagaggaaagggaagtggaggcttaaaccttggtaatttctttgcaagccgtaagggctacagtcgaaaagggtttgaccggcttagcactgagggcagtgaccaagagaaagaggatgatggaagtgaatcagaagaggagtattcagcacctctgcctgcgctcgcaccttcctcctcctgaaaaccaagctttgatttagattgagtaagatttacccagaatgtcagattcctttccctttagcacgtttaaagttctgtgtatttaattgtaaactgtactagtctgtgtgggactgtacacactttatttacttcgttttggttaagttggcttctgtttctagttgaggagtttcctaaaagttcataacagtgccattgtctttatatgaacatagactagagaaaccgtcctctttttccatcataattctaatctaacaatggaagatttgcccatttacacttttgagactttttggtggatgtaaataaccccattctttgcttgaacacagtattttcccaatagcactttcattgccagtgtctttctttggtgcctttcctgttcagcattcttagcctgtggcagtaaagagaaactttgtgctacatgacgacaaagctgctaaatctcctatttttttaaaatcactaacattatattgcaatgaaggaaataaaaaagtctctatttaaattcttttttaaattttcttcagttggtgtgtttttgggatgtcttatttttagatggttacactgttagaacactattttcagaatctgaatgtaatttgtgtaataaagtgttttcagagcaaaaaaaaaaaaaaa

SEQ ID NO: 440 - DNA, 3753 bp, Homo sapiens
gttctgaatgatgactgacgcgggtttgggtgatacccctcacagcccctgtcattccggagtcataaggcacccgcgcgtctagccccagcgccagggcacgcgagcggcgctggagggaggaaagcttccgcctgcgggccggacaaaagtcccgcctgcccacggctttttgcccgccgctcgtgaccgagacgcctcgccgcggccagctcgctgctctcgctggcggatggtgtgtggccgccgcaggacgcccgccgtgcccgggccatgaagtagcggctgctggcggcgccgctgcccaaccgccagccccagccccgcgctgcgctgcccggtcctctcccggcggggtcgtatcggcgtggacatggctggccgcgtccctagcctgctagttctccttgtttttccaagcagctgtttggctttccgaagcccactttctgtctttaagaggtttaaagaaactaccagaccattttccaatgaatgtcttggtaccaccagacccgtagttcctattgattcatcagattttgcattggatattcgcatgcctggggttacacctaaacagtccgatacatacttctgcatgtctatgcgaataccagtggatgaggaagccttcgtgattgacttcaagcctcgagccagcatggatactgtccatcacatgttactttttggatgcaatatgccttcatccactggaagttactggttttgtgatgaaggaacctgtacagataaagccaatattctgtatgcctgggcgagaaatgctccccctacccggctccccaaaggtgttggattcagagttggaggagagactggaagtaaatactttgtactacaggtacactatggggatattagtgcttttagagataataacaaggactgttctggtgtgtccttacacctcacacgtctgccacagcctttaattgctggcatgtaccttatgatgtctgttgacactgttatcccagcaggagaaaaagtggtgaattctgacatttcatgccattataaaaattatccaatgcatgtctttgcctatagagttcacactcaccatttaggtaaggtagtaagtggatacagagtaagaaatggacagtggacactgattggacggcagagccctcagctgccacaggctttctaccctgtggggcatccagttgatgtaagttttggtgacctactggctgcaagatgtgtattcactggtgaaggaaggacagaagccacacacattggtggcacgtctagtgatgaaatgtgcaacttatacattatgtattacatggaagccaagcatgcagtttctttcatgacctgtacccagaatgtagctccagatatgttcagaaccataccaccagaggccaacattccaattcccgtgaagtctgatatggttatgatgcatgaacatcataaagaaacagaatataaagataagattcctttactacagcagccaaaacgagaagaagaagaagtgttagaccagggtgatttctattcactactttccaagctgctaggagaaagggaagatgttgttcatgtgcacaaatataatcctacagaaaaggcagaatcagagtcagacctggtagctgagattgcaaatgtagtccaaaaaaaggatcttggtcgatctgatgccagagagggtgcagaacatgagaggggtaatgctattcttgtcagagacagaattcacaaattccacagactagtatctaccttgaggccaccagagagcagagttttctcattacagcagcccccacctggtgaaggcacctgggaaccagaacacacaggagatttccacatggaagaggcactggattggcctggagtatacttgttaccaggccaggtttctggggtggctctagaccctaagaataacctggtgattttccacagaggtgaccatgtctgggatggaaactcgtttgacagcaagtttgtttaccagcaaataggactcggaccaattgaagaagacactattcttgtcatagatccaaataatgctgcagtactccagtccagtggaaaaaatctgttttacttgccacatggcttgagtatagataaagatgggaattattgggtcacagacgtggctctccatcaggtgttcaaactggatccaaacaataaagaaggccctgtattaatcctgggaaggagcatgcaaccaggcagtgaccagaatcacttctgtcaacccactgatgtggctgtggatccaggcactggagccatttatgtatcagatggttactgcaacagcaggattgtgcagttttcaccaagtggaaagttcatcacacagtggggagaagagtcttcagggagcagtcctctgccaggccagttcactgttcctcacagcttggctcttgtgcctcttttgggccaattatgtgtggcagaccgggaaaatggtcggatccagtgttttaaaactgacaccaaagaatttgtgagagagattaagcattcatcatttggaagaaatgtatttgcaatttcatatataccaggcttgctctttgcagtgaatgggaagcctcattttggggaccaagaacctgtacaaggatttgtgatgaacttttccaatggggaaattatagacatcttcaagccagtgcgcaagcactttgatatgcctcatgatattgttgcatctgaagatgggactgtgtacattggagatgctcataccaacaccgtgtggaagttcaccttgactgagaaattggaacatcgatcagttaaaaaggctggcattgaggtccaggaaatcaaagattctgaacacaaactcgagacgagttcaggaagagtactgggaagatttagaggaaagggaagtggaggcttaaaccttggtaatttctttgcaagccgtaagggctacagtcgaaaagggtttgaccggcttagcactgagggcagtgaccaagagaaagaggatgatggaagtgaatcagaagaggagtattcagcacctctgcctgcgctcgcaccttcctcctcctgaaaaccaagctttgatttagattgagtaagatttacccagaatgtcagattcctttccctttagcacgtttaaagttctgtgtatttaattgtaaactgtactagtctgtgtgggactgtacacactttatttacttcgttttggttaagttggcttctgtttctagttgaggagtttcctaaaagttcataacagtgccattgtctttatatgaacatagactagagaaaccgtcctctttttccatcataattctaatctaacaatggaagatttgcccatttacacttttgagactttttggtggatgtaaataaccccattctttgcttgaacacagtattttcccaatagcactttcattgccagtgtctttctttggtgcctttcctgttcagcattcttagcctgtggcagtaaagagaaactttgtgctacatgacgacaaagctgctaaatctcctatttttttaaaatcactaacattatattgcaatgaaggaaataaaaaagtctctatttaaattcttttttaaattttcttcagttggtgtgtttttgggatgtcttatttttagatggttacactgttagaacactattttcagaatctgaatgtaatttgtgtaataaagtgttttcagagcaaaaaaaaaaaaaaa

SEQ ID NO: 441 - DNA, 3699 bp, Homo sapiens
gttctgaatgatgactgacgcgggtttgggtgatacccctcacagcccctgtcattccggagtcataaggcacccgcgcgtctagccccagcgccagggcacgcgagcggcgctggagggaggaaagcttccgcctgcgggccggacaaaagtcccgcctgcccacggctttttgcccgccgctcgtgaccgagacgcctcgccgcggccagctcgctgctctcgctggcggatggtgtgtggccgccgcaggacgcccgccgtgcccgggccatgaagtagcggctgctggcggcgccgctgcccaaccgccagccccagccccgcgctgcgctgcccggtcctctcccggcggggtcgtatcggcgtggacatggctggccgcgtccctagcctgctagttctccttgtttttccaagcagctgtttggctttccgaagcccactttctgtctttaagaggtttaaagaaactaccagaccattttccaatgaatgtcttggtaccaccagacccgtagttcctattgattcatcagattttgcattggatattcgcatgcctggggttacacctaaacagtccgatacatacttctgcatgtctatgcgaataccagtggatgaggaagccttcgtgattgacttcaagcctcgagccagcatggatactgtccatcacatgttactttttggatgcaatatgccttcatccactggaagttactggttttgtgatgaaggaacctgtacagataaagccaatattctgtatgcctgggcgagaaatgctccccctacccggctccccaaaggtgttggattcagagttggaggagagactggaagtaaatactttgtactacaggtacactatggggatattagtgcttttagagataataacaaggactgttctggtgtgtccttacacctcacacgtctgccacagcctttaattgctggcatgtaccttatgatgtctgttgacactgttatcccagcaggagaaaaagtggtgaattctgacatttcatgccattataaaaattatccaatgcatgtctttgcctatagagttcacactcaccatttaggtaaggtagtaagtggatacagagtaagaaatggacagtggacactgattggacggcagagccctcagctgccacaggctttctaccctgtggggcatccagttgatgtaagttttggtgacctactggctgcaagatgtgtattcactggtgaaggaaggacagaagccacacacattggtggcacgtctagtgatgaaatgtgcaacttatacattatgtattacatggaagccaagcatgcagtttctttcatgacctgtacccagaatgtagctccagatatgttcagaaccataccaccagaggccaacattccaattcccgtgaagtctgatatggttatgatgcatgaacatcataaagaaacagaatataaagataagattcctttactacagcagccaaaacgagaagaagaagaagtgttagaccagggtgatttctattcactactttccaagctgctaggagaaagggaagatgttgttcatgtgcacaaatataatcctacagaaaaggcagaatcagagtcagacctggtagctgagattgcaaatgtagtccaaaaaaaggatcttggtcgatctgatgccagagagggtgcagaacatgagaggggtaatgctattcttgtcagagacagaattcacaaattccacagactagtatctaccttgaggccaccagagagcagagttttctcattacagcagcccccacctggtgaaggcacctgggaaccagaacacacaggagatttccacatggaagaggcactggattggcctggagtatacttgttaccaggccaggtttctggggtggctctagaccctaagaataacctggtgattttccacagaggtgaccatgtctgggatggaaactcgtttgacagcaagtttgtttaccagcaaataggactcggaccaattgaagaagacactattcttgtcatagatccaaataatgctgcagtactccagtccagtggaaaaaatctgttttacttgccacatggcttgagtatagataaagatgggaattattgggtcacagacgtggctctccatcaggtgttcaaactggatccaaacaataaagaaggccctgtattaatcctgggaaggagcatgcaaccaggcagtgaccagaatcacttctgtcaacccactgatgtggctgtggatccaggcactggagccatttatgtatcagatggttactgcaacagcaggattgtgcagttttcaccaagtggaaagttcatcacacagtggggagaagagtcttcagggagcagtcctctgccaggccagttcactgttcctcacagcttggctcttgtgcctcttttgggccaattatgtgtggcagaccgggaaaatggtcggatccagtgttttaaaactgacaccaaagaatttgtgagagagattaagcattcatcatttggaagaaatgtatttgcaatttcatatataccaggcttgctctttgcagtgaatgggaagcctcattttggggaccaagaacctgtacaaggatttgtgatgaacttttccaatggggaaattatagacatcttcaagccagtgcgcaagcactttgatatgcctcatgatattgttgcatctgaagatgggactgtgtacattggagatgctcataccaacaccgtgtggaagttcaccttgactgagaaattggaacatcgatcagttaaaaaggctggcattgaggtccaggaaatcaaaggaaagggaagtggaggcttaaaccttggtaatttctttgcaagccgtaagggctacagtcgaaaagggtttgaccggcttagcactgagggcagtgaccaagagaaagaggatgatggaagtgaatcagaagaggagtattcagcacctctgcctgcgctcgcaccttcctcctcctgaaaaccaagctttgatttagattgagtaagatttacccagaatgtcagattcctttccctttagcacgtttaaagttctgtgtatttaattgtaaactgtactagtctgtgtgggactgtacacactttatttacttcgttttggttaagttggcttctgtttctagttgaggagtttcctaaaagttcataacagtgccattgtctttatatgaacatagactagagaaaccgtcctctttttccatcataattctaatctaacaatggaagatttgcccatttacacttttgagactttttggtggatgtaaataaccccattctttgcttgaacacagtattttcccaatagcactttcattgccagtgtctttctttggtgcctttcctgttcagcattcttagcctgtggcagtaaagagaaactttgtgctacatgacgacaaagctgctaaatctcctatttttttaaaatcactaacattatattgcaatgaaggaaataaaaaagtctctatttaaattcttttttaaattttcttcagttggtgtgtttttgggatgtcttatttttagatggttacactgttagaacactattttcagaatctgaatgtaatttgtgtaataaagtgttttcagagcaaaaaaaaaaaaaaa

SEQ ID NO: 442 - DNA, 3636 bp, Homo sapiens
gttctgaatgatgactgacgcgggtttgggtgatacccctcacagcccctgtcattccggagtcataaggcacccgcgcgtctagccccagcgccagggcacgcgagcggcgctggagggaggaaagcttccgcctgcgggccggacaaaagtcccgcctgcccacggctttttgcccgccgctcgtgaccgagacgcctcgccgcggccagctcgctgctctcgctggcggatggtgtgtggccgccgcaggacgcccgccgtgcccgggccatgaagtagcggctgctggcggcgccgctgcccaaccgccagccccagccccgcgctgcgctgcccggtcctctcccggcggggtcgtatcggcgtggacatggctggccgcgtccctagcctgctagttctccttgtttttccaagcagctgtttggctttccgaagcccactttctgtctttaagaggtttaaagaaactaccagaccattttccaatgaatgtcttggtaccaccagacccgtagttcctattgattcatcagattttgcattggatattcgcatgcctggggttacacctaaacagtccgatacatacttctgcatgtctatgcgaataccagtggatgaggaagccttcgtgattgacttcaagcctcgagccagcatggatactgtccatcacatgttactttttggatgcaatatgccttcatccactggaagttactggttttgtgatgaaggaacctgtacagataaagccaatattctgtatgcctgggcgagaaatgctccccctacccggctccccaaaggtgttggattcagagttggaggagagactggaagtaaatactttgtactacaggtacactatggggatattagtgcttttagagataataacaaggactgttctggtgtgtccttacacctcacacgtctgccacagcctttaattgctggcatgtaccttatgatgtctgttgacactgttatcccagcaggagaaaaagtggtgaattctgacatttcatgccattataaaaattatccaatgcatgtctttgcctatagagttcacactcaccatttaggtaaggtagtaagtggatacagagtaagaaatggacagtggacactgattggacggcagagccctcagctgccacaggctttctaccctgtggggcatccagttgatgtaagttttggtgacctactggctgcaagatgtgtattcactggtgaaggaaggacagaagccacacacattggtggcacgtctagtgatgaaatgtgcaacttatacattatgtattacatggaagccaagcatgcagtttctttcatgacctgtacccagaatgtagctccagatatgttcagaaccataccaccagaggccaacattccaattcccgtgaagtctgatatggttatgatgcatgaacatcataaagaaacagaatataaagataagattcctttactacagcagccaaaacgagaagaagaagaagtgttagaccaggatttccacatggaagaggcactggattggcctggagtatacttgttaccaggccaggtttctggggtggctctagaccctaagaataacctggtgattttccacagaggtgaccatgtctgggatggaaactcgtttgacagcaagtttgtttaccagcaaataggactcggaccaattgaagaagacactattcttgtcatagatccaaataatgctgcagtactccagtccagtggaaaaaatctgttttacttgccacatggcttgagtatagataaagatgggaattattgggtcacagacgtggctctccatcaggtgttcaaactggatccaaacaataaagaaggccctgtattaatcctgggaaggagcatgcaaccaggcagtgaccagaatcacttctgtcaacccactgatgtggctgtggatccaggcactggagccatttatgtatcagatggttactgcaacagcaggattgtgcagttttcaccaagtggaaagttcatcacacagtggggagaagagtcttcagggagcagtcctctgccaggccagttcactgttcctcacagcttggctcttgtgcctcttttgggccaattatgtgtggcagaccgggaaaatggtcggatccagtgttttaaaactgacaccaaagaatttgtgagagagattaagcattcatcatttggaagaaatgtatttgcaatttcatatataccaggcttgctctttgcagtgaatgggaagcctcattttggggaccaagaacctgtacaaggatttgtgatgaacttttccaatggggaaattatagacatcttcaagccagtgcgcaagcactttgatatgcctcatgatattgttgcatctgaagatgggactgtgtacattggagatgctcataccaacaccgtgtggaagttcaccttgactgagaaattggaacatcgatcagttaaaaaggctggcattgaggtccaggaaatcaaagaagccgaggcagttgttgaaaccaaaatggagaacaaacccacctcctcagaattgcagaagatgcaagagaaacagaaactgatcaaagagccaggctcgggagtgcctgttgttctcattacaacccttctggttattccggtggttgtcctgctggccattgccatatttattcggtggaaaaaatcaagggcctttggagattctgaacacaaactcgagacgagttcaggaagagtactgggaagatttagaggaaagggaagtggaggcttaaaccttggtaatttctttgcaagccgtaagggctacagtcgaaaagggtttgaccggcttagcactgagggcagtgaccaagagaaagaggatgatggaagtgaatcagaagaggagtattcagcacctctgcctgcgctcgcaccttcctcctcctgaaaaccaagctttgatttagattgagtaagatttacccagaatgtcagattcctttccctttagcacgtttaaagttctgtgtatttaattgtaaactgtactagtctgtgtgggactgtacacactttatttacttcgttttggttaagttggcttctgtttctagttgaggagtttcctaaaagttcataacagtgccattgtctttatatgaacatagactagagaaaccgtcctctttttccatcataattctaatctaacaatggaagatttgcccatttacacttttgagactttttggtggatgtaaataaccccattctttgcttgaacacagtattttcccaatagcactttcattgccagtgtctttctttggtgcctttcctgttcagcattcttagcctgtggcagtaaagagaaactttgtgctacatgacgacaaagctgctaaatctcctatttttttaaaatcactaacattatattgcaatgaaggaaataaaaaagtctctatttaaattcttttttaaattttcttcagttggtgtgtttttgggatgtcttatttttagatggttacactgttagaacactattttcagaatctgaatgtaatttgtgtaataaagtgttttcagagcaaaaaaaaaaaaaaa

SEQ ID NO: 443 - DNA, 2974 bp, Homo sapiens
gcccctgcctcggccagaggtttcatttttaactgaatatttacgaaagctggaagcgtgcgaggggggtggggtggggtggaaatagcggctgcttcttttccagggatttatttaatggggatgtgttcaaggcaagagcgaattcagaaggatatcgacgtcgtgatccagaagtccagagctgagaaggactgcctgtttgcagatttcagatactctgactccacctttacttttacctacgttggcggccccagaagtgtatcctactcagtacatgtatctgaagattacccagataatacatatgtgtcaagttcagagaatgatgaagatgtgctagttactacagagccaataccagtaatttttcatagaatagcaacagaattaagaaaaacaaatgacattaactgttgcttatccataaaatccaaattacaaaaggaaaatggggaggaatcaagacagaatagtacagtggaggaagattctgaaggtgacaatgattccgaagaattttattacggaggacaggtgaactatgatggggaactgcacaagcacccacaactggaagctgatttgtcagcagttagagagatatatgggccacatgcagtttctctcagggaatatggagccattgatgatgtagatattgatctgcatatcgatgttagctttcttgatgaggagattgctgtggcttgggaagtaattcgaacagaacctataattgttcgactacactgttcacttacacagtatttaaatggcccagtgcccactgttgatgtctttcagatttccacaaaagagcgatttggattgggacatcagctgaaaaaaatcatgcagacatttgttacacagcagtggaaacagagcaaagaaaaatccaattgcctgcacaataaaaagttgtcagagaagaaagtgaagtctcccctgcatttattttctactttgcgcaggtcgccaagttatcctccccctggttgtggcaaaagcaaatccaaactgaaatctgagcaggacggaatctccaaaacgcataagctgctgcggaggacttgttccagcacagtcaagactgatgatgtgtgtgtcacaaagtcacacaggacctttggccgctccttgtccagcgatcccagggcggagcaggctatgacagcaattaaatcgcacaaacttttgaaccgtccttgccctgcagctgttaagtcagaggaatgcctaactctaaagtcgcatagactattgactcgatcttgttctggagatccacgatgtgagcacaacacaaacttgaagccccataaactgttaagcaggtcttactctagtaatctcagaatggaagaattatatggactgaaaaatcacaaattgctcagcaagtcctactccagtgcccccaagtcatccaaaactgagcttttcaaggaacctaacgcagagggcaggaggctctctcttacctcagggcttattggtatcctaacaccatcttcatcttcatcttctcagcttgctccaaatggtgcaaaatgcattccagtacgagaccgtggcttcctggtgcagacaattgagtttgctgaacagcggatccctgtattaaatgaatattgtgtggtttgtgatgagccacatgtgtttcaaaatggccctatgcttaggcctaccgtatgtgaacgggagctgtgtgtgtttgcttttcaaaccctgggagtaatgaatgaagctgctgatgaaatagcaactggagctcaggtggtagatctactagtatccatgtgtaggtctgcgttggaatctcctagaaaagttgtgattttcgagccatatccttctgtggtagatcctaatgatcctcagatgttggccttcaaccccaggaaaaagaactatgatcgagtaatgaaagcactggatagcataacttctatcagagaaatgacacaagcaccatatctggaaatcaagaagcaaatggataaacaggacccccttgctcatcccttactgcaatgggttatatcaagtaatagatcacatattgtgaaactgccagttaacaggcaattgaagtttatgcatactccacatcagttccttcttctcagcagtccaccagccaaagaatccaattttagagctgctaaaaaactctttggaagcacctttgcatttcatggctcacacattgaaaactggcactccatcctgaggaatggtctggttgttgcttctaatacacgattgcagctccatggtgcaatgtatggaagtggaatctatcttagtccaatgtcaagcatatcatttggttactcagggatgaacaagaaacagaaggtgtcagccaaggacgagccagcttcaagcagtaaaagcagcaatacatcacagtcacagaaaaaaggacagcaatcccaattcctgcaaagccgtaacttaaaatgcatagccttatgtgaagtgatcacctcatctgacctgcacaaacatggagagatatgggttgtccccaatactgaccatgtctgcacacgattctttttcgtctatgaagacggccaagtgggagatgcaaatattaatacacaagaaggaggcattcacaaagagatcctccgagtaattggtaatcaaactgctactggttaaaggaccaccatttaattaacatgattcgaaagccttcctcgggttcaaagctggattttgaactgaagaagattataaaattatttattgttattataaacaaaattaaccctttgaatactgattttttttcttagtatttctaagtatctcattaaatacctaaaatggtataagatttatcaattgtagggttatggaatctagtaataaaatttcaacagcacttaaactgaagtttgggttgctcatacaataaacagattgaaaaaacaaaaaaaaaaaaaaaaag

SEQ ID NO: 444 - DNA, 1651 bp, Homo sapiens
gacctagagaggtcccaggacacgccactgtcccgccttccccattgcccgccccactggccagtccccacgcccacacacccaaggctgccccatctggcgctgattatcctgctgctgccgccaccgctgctgctgctctgcaaaattcagctgctgcctctgtcttgaggaccccagcgcctttcccccggggccatgctgcctgcagccacagcctccctcctggggcccctcctcactgcctgcgccctgctgccttttgcccagggccagacccccaactacaccagacccgtgttcctgtgcggaggggatgtgaagggggaatcaggttacgtggcaagtgaggggttccccaacctctacccccctaataaggagtgcatctggaccataacggtccccgagggccagactgtgtccctctcattccgagtcttcgacctggagctgcaccccgcctgccgctacgatgctctggaggtcttcgctgggtctgggacttccggccagcggctcggacgcttttgtgggaccttccggcctgcgcccctagtcgcccccggcaaccaggtgaccctgaggatgacgacggatgagggcacaggaggacgaggcttcctgctctggtacagcgggcgggccacctcgggcactgagcaccaattttgcggggggcggctggagaaggcccagggaaccctgaccacgcccaactggcccgagtccgattaccccccgggcatcagctgttcctggcacatcatcgcgcccccggaccaggtcatcgcgctgaccttcgagaagtttgacctggagccggacacctactgccgctatgactcggtcagcgtgttcaacggagccgtgagcgacgactcccggaggctggggaagttctgcggcgacgcagtcccgggctccatctcctccgaagggaatgaactcctcgtccagttcgtctcagatctcagtgtcaccgctgatggcttctcagcctcctacaagaccctgccgcggggcactgccaaagaagggcaagggcccggccccaaacggggaactgagcctaaagtcaagctgccccccaagtcccaacctccggagaaaacagaggaatctccttcagcccctgatgcacccacctgcccaaagcagtgccgccggacaggcaccttgcagagcaacttctgtgccagcagccttgtggtgactgcgacagtgaagtccatggttcgggagccaggggagggccttgccgtgactgtcagtcttattggtgcttataaaactggaggactggacctgccttctccacccactggtgcctccctgaagttttacgtgccttgcaagcagtgcccccccatgaagaaaggagtcagttatctgctgatgggccaggtagaagagaacagaggccccgtccttcctccagagagctttgtggttctccaccggcccaaccaggaccagatcctcaccaacctaagcaagaggaagtgcccctctcaacctgtgcgggctgctgcgtcccaggactgagacgcaggccagccccggcccctagccctcaggccttctttcttatccaaataaatgtttcttaatgaggaaaaaaaaaaaaaaaaaaaaaaaaaaaaaaaaa

SEQ ID NO: 445 - DNA, 5054 bp, Homo sapiens
actcagcctggagaccgaagcgcttcactgagcgctcgccgccgcccagcctctcctctcgcgcctcctagctcttcgcagagcaaccaggagccaggagtggtctagagcccgagggtgggaagggggagtctgtctggcttttctcctatcttgcttctttttcctcttcccttcccactcttgttcaagcgagtgtgtgagctatggagcgaagagcctggagtctgcagtgcactgctttcgtcctcttttgcgcttggtgtgcactgaacagtgcaaaagcgaaaaggcaatttgtcaatgaatgggcagcggagatccccgggggcccggaagcagcctcggccatcgccgaggagctgggctatgaccttttgggtcagattggttcacttgaaaatcactacttattcaaacataaaaaccaccccagaaggtctcgaaggagtgcctttcatatcactaagagattatctgatgatgatcgtgtgatatgggctgaacaacagtatgaaaaagaaagaagtaaacgttcagctctaagggactcagcactaaatctcttcaatgatcccatgtggaatcagcaatggtacttgcaagataccaggatgacggcagccctgcccaagctggaccttcatgtgatacctgtttggcaaaaaggcattacgggcaaaggagttgttatcaccgtactggatgatggtttggagtggaatcacacggacatttatgccaactatgatccagaggctagctatgattttaatgataatgaccatgatccatttccccgatatgatcccacaaacgagaacaaacacgggaccagatgtgcaggagaaattgccatgcaagcaaataatcacaaatgcggggttggagttgcatacaattccaaagttggaggcataagaatgctggatggcattgtgacggatgctattgaggccagttcaattggattcaatcctggacacgtggatatttacagtgcaagctggggccctaatgatgatgggaaaactgtggaggggcctggccggctagcccagaaggcttttgaatatggtgtcaaacaggggagacaggggaaggggtccatcttcgtctgggcttcgggaaacggggggcgtcagggagataattgtgactgtgatggctacacagacagcatctacaccatctccatcagcagtgcctcccagcaaggcctatccccctggtacgctgagaagtgctcctccacactggccacctcttacagcagcggagattacaccgaccagagaatcacgagcgctgacctgcacaatgactgcacggagacgcacacaggcacctcggcctctgcacctctggctgctggcatcttcgctctggccctggaagcaaacccaaatctcacctggcgagatatgcagcacctggttgtctggacctctgagtatgacccgctggccaataaccctggatggaaaaagaatggagcaggcttgatggtgaatagtcgatttggatttggcttgctaaatgccaaagctctggtggatttagctgaccccaggacctggaggagcgtgcctgagaagaaagagtgtgttgtaaaggacaatgactttgagcccagagccctgaaagctaatggagaagttatcattgaaattccaacaagagcttgtgaaggacaagaaaatgctatcaagtccctggagcatgtacaatttgaagcaacaattgaatattcccgaagaggagaccttcatgtcacacttacttctgctgctggaactagcactgtgctcttggctgaaagagaacgggatacatctcctaatggctttaagaactgggacttcatgtctgttcacacatggggagagaaccctataggtacttggactttgagaattacagacatgtctggaagaattcaaaatgaaggaagaattgtgaactggaagctgattttgcacgggacctcttctcagccagagcatatgaagcagcctcgtgtgtacacgtcctacaacactgttcagaatgacagaagaggggtggagaagatggtggatccaggggaggagcagcccacacaagagaaccctaaggagaacaccctggtgtccaaaagccccagcagcagcagcgtagggggccggagggatgagttggaggagggagccccttcccaggccatgctgcgactcctgcaaagtgctttcagtaaaaactcaccgccaaagcaatcaccaaagaagtccccaagtgcaaagctcaacatcccttatgaaaacttctacgaagccctggaaaagctgaacaaaccttcccagcttaaagactctgaagacagtctgtataatgactatgttgatgttttttataacactaaaccttacaagcacagagacgaccggctgcttcaagctctggtggacattctgaatgaggaaaattaaaataagtgtgtggtcccaagttggaaatattcatgcttcttccttaccctgcgattttgcctgtgtctgaagtggttgttttgtcatgaattcttatgcttataatatcctttgtggcaccttttctttttctccctaaactgtacatgtgaaggggatgagctcaagcaggaagttcaacttccagaattgatcataggtatttcaaaacacatctttcctgtctgcacaagtgaagtgttttgttctttctggagtcacagttgacaaaaagctcttacactacattagaacactgcattagagcccatttcaattctcaaaagaaaaggcaaaacctgggatatcaattaatttgaaaacataatctgcaaagaatgagaaggagtcagaaactgtttctgtagcttgttccctgtcttgtccatgtggttcttcaaattttgatgccaagaaagtatttggtaggcctaatgaaggagttcactgtaagactcattccctagatctttctattccaaagtgccactcattcctgtagtcaaaatctggtcatgttggtcaaaagctggattatttagatctagaaacagatcttgaaatctgaatgctctggtttgagcaattttcgaacattctttgcctggtgcactgtgtctgtggtgccagaggcgtccgtggatccagaggtggttatgactcgtgctgcatgcctggtctttcctctgtttctccttctgaaagttttctatacctgtctcctttctcagccacaaaataaatgttgggagaaatgatatataccactttcccagaaaaaaaaaaacttacacttgggacttggcaaattcctagtcacaatttttttcagcagtaacaggaaaccacttatcacatggagacctaatgtaataatagaaaaatactcataatagggagaaaccaagagaagttttgtttttgtttttttccaactgtgttcattagaacagcgtgttctaagtatttgaaactgaatgtttattccttgatactaaaagttcttctccaatcctatcactgatagtgtccaaattctcaccaaattgctcctaagcttcaaatcagaagcagaaactggcaggccatggaccttaattgtccctcaggtagattttgtttggtatgcagaatgtttttaaaatatgagtggttattgaaaatatgatgtttcacataaaacctcattctcggacccatctttgctcatggcaacagttagctggagctgagtagcagctgcctgattagatgactctcagtccccatggcaccctgctccatgttacctagagcaggcacttgattccttgctgggcagtatccaataggcatttgattttgcccactcctacactaagcgaatgtgtacaaagtgtaaatgcattaggaaaaacaaactacccgcatcttctgttaggcaggatctgtacaataataattatgagtttgcttatgtaatctcacctcacctggatgatcactaatactaattcatttattactaaccttctggcttccttctctcaatatgcttacaaagtctccagtcacctacaatgctggctttctcccactgagtttgctgtttgcaatttttccatgaagtttgaacttcataaggtaattcatggcattgaactggttcatgaaaagaacactagagtctgtcatttgctttggcttgaagtatggttggtaacacaaattttcacctgctcttctaccatttgaatttgtgtagagggtgtttgcagagcaatgcccgtaatgcttagagaatgttctcctaaaagacttgcggaatcactctgtccttggaagtttcatatattgtttgatatgaagtgttagatagaatttccaatattggagcatatcaaaaagtattaaaactaaaaaggaccagagaattcttagattggcccggaaaggccaataaagagttagaatgaaaactcattacttttccattcccaatctagtgctagatgtataaatctttcttttgattcttcctaacaaaatattttctgggttaaaaccccagccaactcattgggttgtagccaaaggttcactctcaagaagctttaatatttaaataaaatcatattgaatgtttccaacctggagtataatattcagatataaaacagttttgtcagtctttcttagtgcctgtgtggatttttgtgaaaatgtcaaagagaaaacttatatactatttcccttgaaattttaaactatattttctttacaggtatttataatataccaatgcttttatcaaacagaattttaaagagcataataaattatattaaagaaccaaaagttttcctgagaataagaaagtttcacccaataaaatatttttgaaaggcatgttcctctgtcaatgaaaaaaagtacatgtatgtgttgtgatattaaaagtgacatttgtctaatagcctaatacaacatgtagctgagtttaacatgtgtggtcttggtattcttaagggaacttccacattatacatttgatgtattgaccagaat

SEQ ID NO: 446 - DNA, 4273 bp, Homo sapiens
aaagctccttgtgacagcctgacttgctattcttcgagtatgctgctcttgctctaagacgctcatacattggagtcacagcttcgtaaattaaactggaaatagtttgcagacttatcagtcttctgacctgcagcagtgtctctgctatgtttgagatttttgttttggatggtgaaagctagcactccttacaagacatgacagcaaaagattcttcaaaggaacttactgcttctgaacctgaggtttgcataaagactttcaaggagcaaatgcatttagaacttgagcttccgagattaccaggaaacagacctacatctcctaaaatttctccacgcagttcaccaaggaactcaccatgctttttcagaaagttgctggtgaataaaagcattcggcagcgtcgtcgcttcactgtggctcatacatgctttgatgtggaaaatggcccttccccaggtcggagtccactggatccccaggccagctcttccgctgggctggtacttcacgccacctttcctgggcacagccagcgcagagagtcatttctctacagatcagacagcgactatgacttgtcaccaaaggcgatgtcgagaaactcttctcttccaagcgagcaacacggcgatgacttgattgtaactccttttgcccaggtccttgccagcttgcgaagtgtgagaaacaacttcactatactgacaaaccttcatggtacatctaacaagaggtccccagctgctagtcagcctcctgtctccagagtcaacccacaagaagaatcttatcaaaaattagcaatggaaacgctggaggaattagactggtgtttagaccagctagagaccatacagacctaccggtctgtcagtgagatggcttctaacaagttcaaaagaatgctgaaccgggagctgacacacctctcagagatgagccgatcagggaaccaggtgtctgaatacatttcaaatactttcttagacaagcagaatgatgtggagatcccatctcctacccagaaagacagggagaaaaagaaaaagcagcagctcatgacccagataagtggagtgaagaaattaatgcatagttcaagcctaaacaatacaagcatctcacgctttggagtcaacactgaaaatgaagatcacctggccaaggagctggaagacctgaacaaatggggtcttaacatctttaatgtggctggatattctcacaatagacccctaacatgcatcatgtatgctatattccaggaaagagacctcctaaagacattcagaatctcatctgacacatttataacctacatgatgactttagaagaccattaccattctgacgtggcatatcacaacagcctgcacgctgctgatgtagcccagtcgacccatgttctcctttctacaccagcattagacgctgtcttcacagatttggagatcctggctgccatttttgcagctgccatccatgacgttgatcatcctggagtctccaatcagtttctcatcaacacaaattcagaacttgctttgatgtataatgatgaatctgtgttggaaaatcatcaccttgctgtgggtttcaaactgctgcaagaagaacactgtgacatcttcatgaatctcaccaagaagcagcgtcagacactcaggaagatggttattgacatggtgttagcaactgatatgtctaaacatatgagcctgctggcagacctgaagacaatggtagaaacgaagaaagttacaagttcaggcgttcttctcctagacaactataccgatcgcattcaggtccttcgcaacatggtacactgtgcagacctgagcaaccccaccaagtccttggaattgtatcggcaatggacagaccgcatcatggaggaatttttccagcagggagacaaagagcgggagaggggaatggaaattagcccaatgtgtgataaacacacagcttctgtggaaaaatcccaggttggtttcatcgactacattgtccatccattgtgggagacatgggcagatttggtacagcctgatgctcaggacattctcgataccttagaagataacaggaactggtatcagagcatgatacctcaaagtccctcaccaccactggacgagcagaacagggactgccagggtctgatggagaagtttcagtttgaactgactctcgatgaggaagattctgaaggacctgagaaggagggagagggacacagctatttcagcagcacaaagacgctttgtgtgattgatccagaaaacagagattccctgggagagactgacatagacattgcaacagaagacaagtcccccgtggatacataatccccctctccctgtggagatgaacattctatccttgatgagcatgccagctatgtggtagggccagcccaccatgggggccaagacctgcacaggacaagggccacctggcctttcagttacttgagtttggagtcagaaagcaagaccaggaagcaaatagcagctcaggaaatcccacggttgacttgccttgatggcaagcttggtggagagggctgaagctgttgctgggggccgattctgatcaagacacatggcttgaaaatggaagacacaaaactgagagatcattctgcactaagtttcgggaacttatccccgacagtgactgaactcactgactaataacttcatttatgaatcttctcacttgtccctttgtctgccaacctgtgtgccttttttgtaaaacattttcatgtctttaaaatgcctgttgaatacctggagtttagtatcaacttctacacagataagctttcaaagttgacaaacttttttgactctttctggaaaagggaaagaaaatagtcttccttctttcttgggcaatatccttcactttactacagttacttttgcaaacagacagaaaggatacacttctaaccacattttacttccttcccctgttgtccagtccaactccacagtcactcttaaaacttctctctgtttgcctgcctccaacagtacttttaactttttgctgtaaacagaataaaattgaacaaattagggggtagaaaggagcagtggtgtcgttcaccgtgagagtctgcatagaactcagcagtgtgccctgctgtgtcttggaccctgccccccacaggagttgtacagtccctggccctgttccctacctcctctcttcaccccgttaggctgttttcaatgtaatgctgccgtccttctcttgcactgccttctgcgctaacacctccattcctgtttataaccgtgtatttattacttaatgtatataatgtaatgttttgtaagttattaatttatatatctaacattgcctgccaatggtggtgttaaatttgtgtagaaaactctgcctaagagttacgactttttcttgtaatgttttgtattgtgtattatataacccaaacgtcacttagtagagacatatggcccccttggcagagaggacaggggtgggcttttgttcaaagggtctgccctttccctgcctgagttgctacttctgcacaacccctttatgaaccagttttggaaacaatattctcacattagatactaaatggtttatactgagcttttacttttgtatagcttgataggggcagggggcaatgggatgtagtttttacccaggttctatccaaatctatgtgggcatgagttgggttataactggatcctactatcattgtggctttggttcaaaaggaaacactacatttgctcacagatgattcttctgaatgctcccgaactactgactttgaagaggtagcctcctgcctgccattaagcaggaatgtcatgttccagttcattacaaaagaaaacaataaaacaatgtgaatttttataataaaatgtgaactgatgtagcaaattacgcaaatgtgaagcctcttctgataacacttgttaggcctcttactgatgtcagtttcagtttgtaaaatatgtttcatgctttcagttcagcattgtgactcagtaattacagaaaatggcacaaatgtgcatgaccaatgtatgtctatgaacactgcattgtttcaggtggacattttatcattttcaaatgtttctcacaatgtatgttatagtattattattatatattgtgttcaaatgcattctaaagagacttttatatgaggtgaataaagaaaagcatgattagattaaaaaaa

SEQ ID NO: 447 - DNA, 4309 bp, Homo sapiens
gtgcgtaatccttcagctctggtggtaagggagatgcagtgagctcccggctgggagagagggttattttgcaaaactcccctggtaccgtgcccgcggaatattgcaggaggtctgtgaggtattaaaaagtgtcagcaaactgcattgaataacagacatcctaagaggggatattttccacctctataatgaagaaaagcaggagtgtgatgacggtgatggctgatgataatgttaaagattattttgaatgtagcttgagtaaatcctacagttcttccagtaacacacttgggatcgacctctggagagggagaaggtgttgctcaggaaacttacagttaccaccactgtctcaaagacagagtgaaagggcaaggactcctgagggagatggtatttccaggccgaccacactgcctttgacaacgcttccaagcattgctattacaactgtaagccaggagtgctttgatgtggaaaatggcccttccccaggtcggagtccactggatccccaggccagctcttccgctgggctggtacttcacgccacctttcctgggcacagccagcgcagagagtcatttctctacagatcagacagcgactatgacttgtcaccaaaggcgatgtcgagaaactcttctcttccaagcgagcaacacggcgatgacttgattgtaactccttttgcccaggtccttgccagcttgcgaagtgtgagaaacaacttcactatactgacaaaccttcatggtacatctaacaagaggtccccagctgctagtcagcctcctgtctccagagtcaacccacaagaagaatcttatcaaaaattagcaatggaaacgctggaggaattagactggtgtttagaccagctagagaccatacagacctaccggtctgtcagtgagatggcttctaacaagttcaaaagaatgctgaaccgggagctgacacacctctcagagatgagccgatcagggaaccaggtgtctgaatacatttcaaatactttcttagacaagcagaatgatgtggagatcccatctcctacccagaaagacagggagaaaaagaaaaagcagcagctcatgacccagataagtggagtgaagaaattaatgcatagttcaagcctaaacaatacaagcatctcacgctttggagtcaacactgaaaatgaagatcacctggccaaggagctggaagacctgaacaaatggggtcttaacatctttaatgtggctggatattctcacaatagacccctaacatgcatcatgtatgctatattccaggaaagagacctcctaaagacattcagaatctcatctgacacatttataacctacatgatgactttagaagaccattaccattctgacgtggcatatcacaacagcctgcacgctgctgatgtagcccagtcgacccatgttctcctttctacaccagcattagacgctgtcttcacagatttggagatcctggctgccatttttgcagctgccatccatgacgttgatcatcctggagtctccaatcagtttctcatcaacacaaattcagaacttgctttgatgtataatgatgaatctgtgttggaaaatcatcaccttgctgtgggtttcaaactgctgcaagaagaacactgtgacatcttcatgaatctcaccaagaagcagcgtcagacactcaggaagatggttattgacatggtgttagcaactgatatgtctaaacatatgagcctgctggcagacctgaagacaatggtagaaacgaagaaagttacaagttcaggcgttcttctcctagacaactataccgatcgcattcaggtccttcgcaacatggtacactgtgcagacctgagcaaccccaccaagtccttggaattgtatcggcaatggacagaccgcatcatggaggaatttttccagcagggagacaaagagcgggagaggggaatggaaattagcccaatgtgtgataaacacacagcttctgtggaaaaatcccaggttggtttcatcgactacattgtccatccattgtgggagacatgggcagatttggtacagcctgatgctcaggacattctcgataccttagaagataacaggaactggtatcagagcatgatacctcaaagtccctcaccaccactggacgagcagaacagggactgccagggtctgatggagaagtttcagtttgaactgactctcgatgaggaagattctgaaggacctgagaaggagggagagggacacagctatttcagcagcacaaagacgctttgtgtgattgatccagaaaacagagattccctgggagagactgacatagacattgcaacagaagacaagtcccccgtggatacataatccccctctccctgtggagatgaacattctatccttgatgagcatgccagctatgtggtagggccagcccaccatgggggccaagacctgcacaggacaagggccacctggcctttcagttacttgagtttggagtcagaaagcaagaccaggaagcaaatagcagctcaggaaatcccacggttgacttgccttgatggcaagcttggtggagagggctgaagctgttgctgggggccgattctgatcaagacacatggcttgaaaatggaagacacaaaactgagagatcattctgcactaagtttcgggaacttatccccgacagtgactgaactcactgactaataacttcatttatgaatcttctcacttgtccctttgtctgccaacctgtgtgccttttttgtaaaacattttcatgtctttaaaatgcctgttgaatacctggagtttagtatcaacttctacacagataagctttcaaagttgacaaacttttttgactctttctggaaaagggaaagaaaatagtcttccttctttcttgggcaatatccttcactttactacagttacttttgcaaacagacagaaaggatacacttctaaccacattttacttccttcccctgttgtccagtccaactccacagtcactcttaaaacttctctctgtttgcctgcctccaacagtacttttaactttttgctgtaaacagaataaaattgaacaaattagggggtagaaaggagcagtggtgtcgttcaccgtgagagtctgcatagaactcagcagtgtgccctgctgtgtcttggaccctgccccccacaggagttgtacagtccctggccctgttccctacctcctctcttcaccccgttaggctgttttcaatgtaatgctgccgtccttctcttgcactgccttctgcgctaacacctccattcctgtttataaccgtgtatttattacttaatgtatataatgtaatgttttgtaagttattaatttatatatctaacattgcctgccaatggtggtgttaaatttgtgtagaaaactctgcctaagagttacgactttttcttgtaatgttttgtattgtgtattatataacccaaacgtcacttagtagagacatatggcccccttggcagagaggacaggggtgggcttttgttcaaagggtctgccctttccctgcctgagttgctacttctgcacaacccctttatgaaccagttttggaaacaatattctcacattagatactaaatggtttatactgagcttttacttttgtatagcttgataggggcagggggcaatgggatgtagtttttacccaggttctatccaaatctatgtgggcatgagttgggttataactggatcctactatcattgtggctttggttcaaaaggaaacactacatttgctcacagatgattcttctgaatgctcccgaactactgactttgaagaggtagcctcctgcctgccattaagcaggaatgtcatgttccagttcattacaaaagaaaacaataaaacaatgtgaatttttataataaaatgtgaactgatgtagcaaattacgcaaatgtgaagcctcttctgataacacttgttaggcctcttactgatgtcagtttcagtttgtaaaatatgtttcatgctttcagttcagcattgtgactcagtaattacagaaaatggcacaaatgtgcatgaccaatgtatgtctatgaacactgcattgtttcaggtggacattttatcattttcaaatgtttctcacaatgtatgttatagtattattattatatattgtgttcaaatgcattctaaagagacttttatatgaggtgaataaagaaaagcatgattagattaaaaaaa

SEQ ID NO: 448 - DNA, 4264 bp, Homo sapiens
agagcgctgcggccgcggcggtgcagcagaggcgcctcgggcaggaggagggcggcttctgcgagggcagcctgaggtattaaaaagtgtcagcaaactgcattgaataacagacatcctaagaggggatattttccacctctataatgaagaaaagcaggagtgtgatgacggtgatggctgatgataatgttaaagattattttgaatgtagcttgagtaaatcctacagttcttccagtaacacacttgggatcgacctctggagagggagaaggtgttgctcaggaaacttacagttaccaccactgtctcaaagacagagtgaaagggcaaggactcctgagggagatggtatttccaggccgaccacactgcctttgacaacgcttccaagcattgctattacaactgtaagccaggagtgctttgatgtggaaaatggcccttccccaggtcggagtccactggatccccaggccagctcttccgctgggctggtacttcacgccacctttcctgggcacagccagcgcagagagtcatttctctacagatcagacagcgactatgacttgtcaccaaaggcgatgtcgagaaactcttctcttccaagcgagcaacacggcgatgacttgattgtaactccttttgcccaggtccttgccagcttgcgaagtgtgagaaacaacttcactatactgacaaaccttcatggtacatctaacaagaggtccccagctgctagtcagcctcctgtctccagagtcaacccacaagaagaatcttatcaaaaattagcaatggaaacgctggaggaattagactggtgtttagaccagctagagaccatacagacctaccggtctgtcagtgagatggcttctaacaagttcaaaagaatgctgaaccgggagctgacacacctctcagagatgagccgatcagggaaccaggtgtctgaatacatttcaaatactttcttagacaagcagaatgatgtggagatcccatctcctacccagaaagacagggagaaaaagaaaaagcagcagctcatgacccagataagtggagtgaagaaattaatgcatagttcaagcctaaacaatacaagcatctcacgctttggagtcaacactgaaaatgaagatcacctggccaaggagctggaagacctgaacaaatggggtcttaacatctttaatgtggctggatattctcacaatagacccctaacatgcatcatgtatgctatattccaggaaagagacctcctaaagacattcagaatctcatctgacacatttataacctacatgatgactttagaagaccattaccattctgacgtggcatatcacaacagcctgcacgctgctgatgtagcccagtcgacccatgttctcctttctacaccagcattagacgctgtcttcacagatttggagatcctggctgccatttttgcagctgccatccatgacgttgatcatcctggagtctccaatcagtttctcatcaacacaaattcagaacttgctttgatgtataatgatgaatctgtgttggaaaatcatcaccttgctgtgggtttcaaactgctgcaagaagaacactgtgacatcttcatgaatctcaccaagaagcagcgtcagacactcaggaagatggttattgacatggtgttagcaactgatatgtctaaacatatgagcctgctggcagacctgaagacaatggtagaaacgaagaaagttacaagttcaggcgttcttctcctagacaactataccgatcgcattcaggtccttcgcaacatggtacactgtgcagacctgagcaaccccaccaagtccttggaattgtatcggcaatggacagaccgcatcatggaggaatttttccagcagggagacaaagagcgggagaggggaatggaaattagcccaatgtgtgataaacacacagcttctgtggaaaaatcccaggttggtttcatcgactacattgtccatccattgtgggagacatgggcagatttggtacagcctgatgctcaggacattctcgataccttagaagataacaggaactggtatcagagcatgatacctcaaagtccctcaccaccactggacgagcagaacagggactgccagggtctgatggagaagtttcagtttgaactgactctcgatgaggaagattctgaaggacctgagaaggagggagagggacacagctatttcagcagcacaaagacgctttgtgtgattgatccagaaaacagagattccctgggagagactgacatagacattgcaacagaagacaagtcccccgtggatacataatccccctctccctgtggagatgaacattctatccttgatgagcatgccagctatgtggtagggccagcccaccatgggggccaagacctgcacaggacaagggccacctggcctttcagttacttgagtttggagtcagaaagcaagaccaggaagcaaatagcagctcaggaaatcccacggttgacttgccttgatggcaagcttggtggagagggctgaagctgttgctgggggccgattctgatcaagacacatggcttgaaaatggaagacacaaaactgagagatcattctgcactaagtttcgggaacttatccccgacagtgactgaactcactgactaataacttcatttatgaatcttctcacttgtccctttgtctgccaacctgtgtgccttttttgtaaaacattttcatgtctttaaaatgcctgttgaatacctggagtttagtatcaacttctacacagataagctttcaaagttgacaaacttttttgactctttctggaaaagggaaagaaaatagtcttccttctttcttgggcaatatccttcactttactacagttacttttgcaaacagacagaaaggatacacttctaaccacattttacttccttcccctgttgtccagtccaactccacagtcactcttaaaacttctctctgtttgcctgcctccaacagtacttttaactttttgctgtaaacagaataaaattgaacaaattagggggtagaaaggagcagtggtgtcgttcaccgtgagagtctgcatagaactcagcagtgtgccctgctgtgtcttggaccctgccccccacaggagttgtacagtccctggccctgttccctacctcctctcttcaccccgttaggctgttttcaatgtaatgctgccgtccttctcttgcactgccttctgcgctaacacctccattcctgtttataaccgtgtatttattacttaatgtatataatgtaatgttttgtaagttattaatttatatatctaacattgcctgccaatggtggtgttaaatttgtgtagaaaactctgcctaagagttacgactttttcttgtaatgttttgtattgtgtattatataacccaaacgtcacttagtagagacatatggcccccttggcagagaggacaggggtgggcttttgttcaaagggtctgccctttccctgcctgagttgctacttctgcacaacccctttatgaaccagttttggaaacaatattctcacattagatactaaatggtttatactgagcttttacttttgtatagcttgataggggcagggggcaatgggatgtagtttttacccaggttctatccaaatctatgtgggcatgagttgggttataactggatcctactatcattgtggctttggttcaaaaggaaacactacatttgctcacagatgattcttctgaatgctcccgaactactgactttgaagaggtagcctcctgcctgccattaagcaggaatgtcatgttccagttcattacaaaagaaaacaataaaacaatgtgaatttttataataaaatgtgaactgatgtagcaaattacgcaaatgtgaagcctcttctgataacacttgttaggcctcttactgatgtcagtttcagtttgtaaaatatgtttcatgctttcagttcagcattgtgactcagtaattacagaaaatggcacaaatgtgcatgaccaatgtatgtctatgaacactgcattgtttcaggtggacattttatcattttcaaatgtttctcacaatgtatgttatagtattattattatatattgtgttcaaatgcattctaaagagacttttatatgaggtgaataaagaaaagcatgattagattaaaaaaa

SEQ ID NO: 449 - DNA, 3882 bp, Homo sapiens
cacataccctaaagaaccctgggatgactaaggcagagagagtctgagaaaactctttggtgcttctgcctttagttttaggacacatttatgcagatgagcttataagagaccgttccctccgccttcttcctcagaggaagtttcttggtagatcaccgacacctcatccaggcggggggttggggggaaacttggcaccagccatcccaggcagagcaccactgtgatttgttctcctggtggagagagctggaaggaaggagccagcgtgcaaataatgaaggagcacgggggcaccttcagtagcaccggaatcagcggtggtagcggtgactctgctatggacagcctgcagccgctccagcctaactacatgcctgtgtgtttgtttgcagaagaatcttatcaaaaattagcaatggaaacgctggaggaattagactggtgtttagaccagctagagaccatacagacctaccggtctgtcagtgagatggcttctaacaagttcaaaagaatgctgaaccgggagctgacacacctctcagagatgagccgatcagggaaccaggtgtctgaatacatttcaaatactttcttagacaagcagaatgatgtggagatcccatctcctacccagaaagacagggagaaaaagaaaaagcagcagctcatgacccagataagtggagtgaagaaattaatgcatagttcaagcctaaacaatacaagcatctcacgctttggagtcaacactgaaaatgaagatcacctggccaaggagctggaagacctgaacaaatggggtcttaacatctttaatgtggctggatattctcacaatagacccctaacatgcatcatgtatgctatattccaggaaagagacctcctaaagacattcagaatctcatctgacacatttataacctacatgatgactttagaagaccattaccattctgacgtggcatatcacaacagcctgcacgctgctgatgtagcccagtcgacccatgttctcctttctacaccagcattagacgctgtcttcacagatttggagatcctggctgccatttttgcagctgccatccatgacgttgatcatcctggagtctccaatcagtttctcatcaacacaaattcagaacttgctttgatgtataatgatgaatctgtgttggaaaatcatcaccttgctgtgggtttcaaactgctgcaagaagaacactgtgacatcttcatgaatctcaccaagaagcagcgtcagacactcaggaagatggttattgacatggtgttagcaactgatatgtctaaacatatgagcctgctggcagacctgaagacaatggtagaaacgaagaaagttacaagttcaggcgttcttctcctagacaactataccgatcgcattcaggtccttcgcaacatggtacactgtgcagacctgagcaaccccaccaagtccttggaattgtatcggcaatggacagaccgcatcatggaggaatttttccagcagggagacaaagagcgggagaggggaatggaaattagcccaatgtgtgataaacacacagcttctgtggaaaaatcccaggttggtttcatcgactacattgtccatccattgtgggagacatgggcagatttggtacagcctgatgctcaggacattctcgataccttagaagataacaggaactggtatcagagcatgatacctcaaagtccctcaccaccactggacgagcagaacagggactgccagggtctgatggagaagtttcagtttgaactgactctcgatgaggaagattctgaaggacctgagaaggagggagagggacacagctatttcagcagcacaaagacgctttgtgtgattgatccagaaaacagagattccctgggagagactgacatagacattgcaacagaagacaagtcccccgtggatacataatccccctctccctgtggagatgaacattctatccttgatgagcatgccagctatgtggtagggccagcccaccatgggggccaagacctgcacaggacaagggccacctggcctttcagttacttgagtttggagtcagaaagcaagaccaggaagcaaatagcagctcaggaaatcccacggttgacttgccttgatggcaagcttggtggagagggctgaagctgttgctgggggccgattctgatcaagacacatggcttgaaaatggaagacacaaaactgagagatcattctgcactaagtttcgggaacttatccccgacagtgactgaactcactgactaataacttcatttatgaatcttctcacttgtccctttgtctgccaacctgtgtgccttttttgtaaaacattttcatgtctttaaaatgcctgttgaatacctggagtttagtatcaacttctacacagataagctttcaaagttgacaaacttttttgactctttctggaaaagggaaagaaaatagtcttccttctttcttgggcaatatccttcactttactacagttacttttgcaaacagacagaaaggatacacttctaaccacattttacttccttcccctgttgtccagtccaactccacagtcactcttaaaacttctctctgtttgcctgcctccaacagtacttttaactttttgctgtaaacagaataaaattgaacaaattagggggtagaaaggagcagtggtgtcgttcaccgtgagagtctgcatagaactcagcagtgtgccctgctgtgtcttggaccctgccccccacaggagttgtacagtccctggccctgttccctacctcctctcttcaccccgttaggctgttttcaatgtaatgctgccgtccttctcttgcactgccttctgcgctaacacctccattcctgtttataaccgtgtatttattacttaatgtatataatgtaatgttttgtaagttattaatttatatatctaacattgcctgccaatggtggtgttaaatttgtgtagaaaactctgcctaagagttacgactttttcttgtaatgttttgtattgtgtattatataacccaaacgtcacttagtagagacatatggcccccttggcagagaggacaggggtgggcttttgttcaaagggtctgccctttccctgcctgagttgctacttctgcacaacccctttatgaaccagttttggaaacaatattctcacattagatactaaatggtttatactgagcttttacttttgtatagcttgataggggcagggggcaatgggatgtagtttttacccaggttctatccaaatctatgtgggcatgagttgggttataactggatcctactatcattgtggctttggttcaaaaggaaacactacatttgctcacagatgattcttctgaatgctcccgaactactgactttgaagaggtagcctcctgcctgccattaagcaggaatgtcatgttccagttcattacaaaagaaaacaataaaacaatgtgaatttttataataaaatgtgaactgatgtagcaaattacgcaaatgtgaagcctcttctgataacacttgttaggcctcttactgatgtcagtttcagtttgtaaaatatgtttcatgctttcagttcagcattgtgactcagtaattacagaaaatggcacaaatgtgcatgaccaatgtatgtctatgaacactgcattgtttcaggtggacattttatcattttcaaatgtttctcacaatgtatgttatagtattattattatatattgtgttcaaatgcattctaaagagacttttatatgaggtgaataaagaaaagcatgattagattaaaaaaa

SEQ ID NO: 450 - DNA, 2944 bp, Homo sapiens
agtatgttttgcagacaagacccagagaagtccagactggacttgttgcagactgcaaaactgccattggaaggcctccgtcccagtccttctacagagtagccagtgggactcccagccatgggcgaggtgacagcagaggaggtggagaagttcctggactcgaatattggctttgccaaacagtactacaacctccactaccgggccaagctcatctccgacctccttggggccaaggaggctgccgtggacttcagcaactaccactccccgagcagcatggaggagagcgaaatcatctttgatctcctgcgggactttcaggagaatttacagacagagaaatgcatcttcaatgtcatgaagaagctgtgcttcctcctgcaggcagaccgcatgagcctgttcatgtaccggacccgcaatggcatcgcagagctggccaccaggcttttcaatgtccacaaggatgctgtcctcgaggactgcctggtgatgcccgaccaagagatcgtcttccctttggacatgggcatcgtgggccatgtcgcacactctaagaagattgctaacgtccccaacacagaggaggatgagcatttctgtgactttgtggacatcctcacagagtacaagaccaagaacatcttggcttcccccataatgaatgggaaggatgtggtggccataatcatggctgtgaataaagtggatggatcccacttcaccaagagagatgaagagattcttctcaagtacctcaattttgcaaatctaatcatgaagtggtaccacctgagttacctgcacaactgtgaaactcgacgtggccagatactgctgtggtctgggagcaaagtctttgaagaacttacggacatcgaacgacagttccacaaagccctgtacacagtccgtgctttcctcaactgtgacagatactctgtgggtctcttagacatgaccaagcagaaggaattttttgatgtgtggccggttctgatgggtgaagttccaccttactctggtcccaggactccggatggaagagaaattaacttttacaaggtcattgactacatcctgcatggcaaagaggacatcaaagtcatcccgaatccacctcctgaccattgggctttagtaagcggtctccccgcttatgttgcccagaatggcctgatttgcaacatcatgaacgcgcctgcggaggacttttttgcatttcagaaagaacctctggatgagtctggatggatgattaaaaatgtgctttcaatgccgattgtgaacaagaaggaagaaattgttggagtggccacattttacaatcgtaaagatgggaagccctttgatgaaatggatgagacgctcatggagtctttgactcaatttctgggctggtctgtcttaaatcctgacacctatgagtcaatgaataaacttgaaaataggaaggatattttccaggacatagtaaaatatcatgtgaagtgtgacaatgaagaaattcagaaaatcttgaaaaccagagaggtgtatgggaaggagccatgggagtgtgaggaagaggagctggctgagatcctgcaagcggagctgccagatgcagataaatacgaaattaataaatttcacttcagtgacttacccctaacagaactggagctggtaaaatgtggaatacagatgtattatgagctcaaagtggtggataaatttcacattccacaagaggccctggtgcggttcatgtactccctgagtaagggctaccgcaagatcacctaccacaactggcggcacggcttcaacgtggggcagaccatgttctccctgctggtgacgggaaagctgaagcgctacttcacggacctagaggccttggccatggtcactgctgctttctgccatgacattgaccacagaggcaccaataacctctaccagatgaaatcccagaacccactggccaagctccatgggtcctctatcttggaaagacaccacttggagtttggcaaaacactgctcagagacgagagcctgaatatctttcaaaacctcaatcgtcgacagcatgagcatgccatccacatgatggacattgcaatcattgccacagacctcgccctgtatttcaagaagaggacgatgttccaaaagatcgtggatcagtctaagacatatgagagtgaacaggagtggacacagtacatgatgctggagcagacacggaaggaaatcgttatggccatgatgatgaccgcctgtgatctctcagccatcaccaaaccctgggaggtgcagagccaggtagctctgctggtggctgctgaattctgggaacaaggtgacctggagcgcacggtgctgcaacagaatcccattcccatgatggacagaaacaaagcagatgaactccctaagcttcaagtcggcttcattgactttgtttgcaccttcgtctacaaggaattctcccgtttccacgaggagatcaccccaatgttggacgggatcaccaacaatcgcaaggagtggaaggcgcttgctgatgagtacgatgccaagatgaaggtgcaggaggagaagaagcagaaacagcagtcggccaagtcagcagccgcaggaaatcagccggggggaaaccccagcccagggggtgcaactacatccaagtcctgctgcatccagtaacaccactggggatgtgctggctggacggcaccaccctttcctgggaagagatgactcaagccagtggaagaccacacaccttgagaagtagaagagtcataggatttgaaagctgttagagaatttagcttccaggactgttcaatcttttggcttccctgggccacattggaagaattgtcttgggtcacacataaaatacagtaacactaatgatagctgttgaacttaaaaaaaaaaa

SEQ ID NO: 451 - DNA, 1722 bp, Homo sapiens
gcggccggtcgaccggagtggctgccctgcgcggggacactcagagcccggtgggcgggaggaaggcggcatgccccagacggtgatcctcccgggccctgcgccctggggcttcaggctctcagggggcatagacttcaaccagcctttggtcatcaccaggattacaccaggaagcaaggcggcagctgccaacctgtgtcctggagatgtcatcctggctattgacggctttgggacagagtccatgactcatgctgatgcgcaggacaggattaaagcagcagctcaccagctgtgtctcaaaattgacaggggagaaactcacttatggtctccacaagtatctgaagatgggaaagcccatcctttcaaaatcaacttagaatcagaaccacaggacgggaactactttgaacacaagcataatattcggcccaaacctttcgtgatcccgggccgaagcagtggatgcagcactccctccgggattgactgtggcagtggacgcagcaccccttcttctgtcagtactgttagtaccatttgcccaggtgacttgaaagttgcggctaagctggcccctaacattcctttggaaatggaacttcctggtgtgaagattgtacatgctcagtttaatacacctatgcagttgtactcagatgacaatattatggaaacactccagggtcaggtttcaacagccctaggggaaacacctttgatgaacgagcccacagcctcggtgccccccgagtcggacgtgtaccggatgctccacgacaatcggaatgagcccacacagcctcgccagtcgggctccttcagagtgctccagggaatggtggacgatggctctgatgaccgtccggctggaacgcggagtgtgagagctccggtgacgaaagtccatggcggttcaggcggggcacagaggatgccgctctgtgacaaatgtgggagtggcatagttggtgctgtggtgaaggcgcgggataagtaccggcaccctgagtgcttcgtgtgtgccgactgcaacctcaacctcaagcaaaagggctacttcttcatagaaggggagctgtactgcgaaacccacgcaagagcccgcacaaagcccccagagggctatgacacggtcactctgtatcccaaagcttaagtctctgcaggcgtggcacgcacgcacgcacccacccacgcgcacttacacgagaagacattcatggctttgggcagaaggattgtgcagattgtcaactccaaatctaaagtcaaggctttagacctttatcctattgtttattgaggaaaaggaatgggaggcaaatgcctgctatgtgaaaaaaacatacacttagctatgttttgcaactctttttggggctagcaataatgatatttaaagcaataattttttgtatgtcatactccacaatttacatgtatattacagccatcaaacacataaacatcaagatatttgaaggactctaattgtctttccttgacaagttgattttgcaattgtggtaaatagcaaataacaatcttgtattctaacataatctgcagttgtctgtatgtgttttaactattacagtgcatgttagggagaaattccctgaatttctttagttttgtattcaaacaattatgccactcgatgcaacaaacataataaatacataaaggatttaaaaaaaaaaaaaaaaaaaa

SEQ ID NO: 452 - DNA, 894 bp, Homo sapiens
gcccgtcttcgtgtctcctccctccctcgccttcctccttcctagctcctctcctccagggccagactgagcccaggttgatttcaggcggacaccaatagactccacagcagctccaggagcccagacaccggcggccagaagcaaggctaggagctgctgcagccatgtcggccctcagcctcctcattctgggcctgctcacggcagtgccacctgccagctgtcagcaaggcctggggaaccttcagccctggatgcagggccttatcgcggtggccgtgttcctggtcctcgttgcaatcgcctttgcagtcaaccacttctggtgccaggaggagccggagcctgcacacatgatcctgaccgtcggaaacaaggcagatggagtcctggtgggaacagatggaaggtactcttcgatggcggccagtttcaggtccagtgagcatgagaatgcctatgagaatgtgcccgaggaggaaggcaaggtccgcagcaccccgatgtaaccttctctgtggctccaaccccaagactcccaggcacatgggatggatgtccagtgctaccacccaagccccctccttctttgtgtggaatctgcaatagtgggctgactccctccagccccatgccggccctacccgcccttgaagtatagccagccaaggttggagctcagaccgtgtctaggttggggctcggctgtggccctggggtctcctgctcagctcagaagagccttctggagaggacagtcagctgagcacctcccatcctgctcacacgtccttccccataactatggaaatggccctaatttctgtgaaataaagactttttgtatttctggggctgaggctcagcaacagcccctcaggcttccagtga

SEQ ID NO: 453 - DNA, 3754 bp, Homo sapiens
ccaggccccattgttcccggtttccagccatggctgccattacctgaccagcgccacagccggtctctctgcaggcgccgggagaagtgaccagagcaatttctgcttttcacagggcgggtttctcaacggtgacttgtgggcagtgccttctgctgagcgagtcatggcccgaaggcagaactaactgtgcctgcagtcttcactctcaggatgcagccgaggtgggcccaaggggccacgatgtggcttggagtcctgctgacccttctgctctgttcaagccttgagggtcaagaaaactctttcacaatcaacagtgttgacatgaagagcctgccggactggacggtgcaaaatgggaagaacctgaccctgcagtgcttcgcggatgtcagcaccacctctcacgtcaagcctcagcaccagatgctgttctataaggatgacgtgctgttttacaacatctcctccatgaagagcacagagagttattttattcctgaagtccggatctatgactcagggacatataaatgtactgtgattgtgaacaacaaagagaaaaccactgcagagtaccagctgttggtggaaggagtgcccagtcccagggtgacactggacaagaaagaggccatccaaggtgggatcgtgagggtcaactgttctgtcccagaggaaaaggccccaatacacttcacaattgaaaaacttgaactaaatgaaaaaatggtcaagctgaaaagagagaagaattctcgagaccagaattttgtgatactggaattccccgttgaggaacaggaccgcgttttatccttccgatgtcaagctaggatcatttctgggatccatatgcagacctcagaatctaccaagagtgaactggtcaccgtgacggaatccttctctacacccaagttccacatcagccccaccggaatgatcatggaaggagctcagctccacattaagtgcaccattcaagtgactcacctggcccaggagtttccagaaatcataattcagaaggacaaggcgattgtggcccacaacagacatggcaacaaggctgtgtactcagtcatggccatggtggagcacagtggcaactacacgtgcaaagtggagtccagccgcatatccaaggtcagcagcatcgtggtcaacataacagaactattttccaagcccgaactggaatcttccttcacacatctggaccaaggtgaaagactgaacctgtcctgctccatcccaggagcacctccagccaacttcaccatccagaaggaagatacgattgtgtcacagactcaagatttcaccaagatagcctcaaagtcggacagtgggacgtatatctgcactgcaggtattgacaaagtggtcaagaaaagcaacacagtccagatagtcgtatgtgaaatgctctcccagcccaggatttcttatgatgcccagtttgaggtcataaaaggacagaccatcgaagtccgttgcgaatcgatcagtggaactttgcctatttcttaccaacttttaaaaacaagtaaagttttggagaatagtaccaagaactcaaatgatcctgcggtattcaaagacaaccccactgaagacgtcgaataccagtgtgttgcagataattgccattcccacgccaaaatgttaagtgaggttctgagggtgaaggtgatagccccggtggatgaggtccagatttctatcctgtcaagtaaggtggtggagtctggagaggacattgtgctgcaatgtgctgtgaatgaaggatctggtcccatcacctataagttttacagagaaaaagagggcaaacccttctatcaaatgacctcaaatgccacccaggcattttggaccaagcagaaggctagcaaggaacaggagggagagtattactgcacagccttcaacagagccaaccacgcctccagtgtccccagaagcaaaatactgacagtcagagtcattcttgccccatggaagaaaggacttattgcagtggttatcatcggagtgatcattgctctcttgatcattgcggccaaatgttattttctgaggaaagccaaggccaagcagatgccagtggaaatgtccaggccagcagtaccacttctgaactccaacaacgagaaaatgtcagatcccaatatggaagctaacagtcattacggtcacaatgacgatgtcagaaaccatgcaatgaaaccaataaatgataataaagagcctctgaactcagacgtgcagtacacggaagttcaagtgtcctcagctgagtctcacaaagatctaggaaagaaggacacagagacagtgtacagtgaagtccggaaagctgtccctgatgccgtggaaagcagatactctagaacggaaggctcccttgatggaacttagacagcaaggccagatgcacatccctggaaggacatccatgttccgagaagaacagataatccctgtatttcaagacctctgtgcacttatttatgaacctgccctgctcccacagaacacagcaattcctcaggctaagctgccggttcttaaatccatcctgctaagttaatgttgggtagaaagagatacagaggggctgttgaatttcccacataccctccttccaccaagttggaacatccttggaaattggaagagcacaagaggagatccagggcaaggccattgggatattctgaaacttgaatattttgttttgtgcagagataaagaccttttccatgcaccctcatacacagaaaccaattttcttttttatactcaatcatttctagcgcatggcctggttagaggctggttttttctcttttcctttggtccttcaaaggcttgtagttttggctagtccttgttctttggaaatacacagtgctgaccagacagcctccccctgtcccctctatgacctcgccctccacaaatgggaaaaccagactacttgggagcaccgcctgtgaaataccaacctgaagacaccgttcattcaggcaacgcacaaaacagaaaatgaaggtggaacaagcacagatgttcttcaactgtttttgtctacactctttctcttttcctctaccatgctgaaggctgaaagacaggaagatggtgccatcagcaaatattattcttaattgaaaacttgaaatgtgtatgtttcttactaatttttaaaaatgtattccttgccagggcaggcaaggtggctcacgcctgtaatcccagcacttcaggaggctgaggtgggcggatcacctgaggtcaggagtttgagaccagcctgatgaaaccctgtctctactaaaaatacaagaattagccgggcgtggtggcgcatgcctgtagtatcagctactcaagaggctgaggtgagattatcgcttgaacccaggaaacggaggttgtagtgagcggagatcgcgccactgcactccagcctgagtgacagagtgagaatccatctcaaaaaaaacaaaaaacaaaattgcttgctaaagaagtggtctcctgaggtcttaagacattcctgacagtgtcttgagtgggtgggagagaggctgctgtcattgcgctgtggaatttcacagatgagaaccacgcctagccaaaatcacttttcctgtttgcctcagtgacacagctgcagggaccctcgtggatgttgtattaaataaatttgacctttgctctttgcaaaaaaaaaaaa

SEQ ID NO: 454 - DNA, 5913 bp, Homo sapiens
gtggacgcagcgggctttggaaaggccccaagttaatgaggcgtgcgccggctgccgagcgcctcttggagctgggctttcccccgcggtgcgggcgccaggagccgccttttccgctgggtgtcactcgggggtggggaagatggcccattcaaaagcgccgcgagggggcccggccagtgcccttcagtgagcgctcgcaagaggacggcagaggcccggcagctcggagctccgggaccttgtggcgcatcaggacgcggctgtccctctgccgggacccagagccgccgccgccgctctgcctcctgcgtgttagcctcctctgcgcgctccgggcaggcggccgtgggagccgctggggcgaggacggcgcgaggctgctgctgctgcccccggcccgcgcggctggaaacggagaggccgagccaagcggcggcccctcttatgctgggaggatgctggagagtagcggctgcaaagcgctgaaggagggcgtgctggagaagcgcagcgacgggttgttgcagctctggaagaaaaagtgttgcatcctcaccgaggaagggctgctgcttatcccgcccaagcagctgcaacaccagcagcagcagcagcaacagcagcagcagcagcagcaacaacagcccgggcaggggccggccgagccgtcccaacccagtggccccgctgtcgccagcctcgagccgccggtcaagctcaaggaactgcacttctccaacatgaagaccgtggactgtgtggagcgcaagggcaagtacatgtacttcactgtggtgatggcagagggcaaggagatcgactttcggtgcccgcaagaccagggctggaacgccgagatcacgctgcagatggtgcagtacaagaatcgtcaggccatcctggcggtcaaatccacgcggcagaagcagcagcacctggtccagcagcagcccccctcgcagccgcagccgcagccgcagctccagccccaaccccagcctcagcctcagccgcaaccccagccccaatcacaaccccagcctcagccccaacccaagcctcagccccagcagctccacccgtatccgcatccacatccacatccacactctcatcctcactcgcacccacaccctcacccgcacccgcatccgcaccaaataccgcacccacacccacagccgcactcgcagccgcacgggcaccggcttctccgcagcacctccaactctgcctgaaaggggcagctcccgggcaagacaaggttttgaggacttgaggaagtgggacgagcacatttctattgtcttcacttggatcaaaagcaaaacagtctctccgccccgcaccagatcaagtagtttggacatcaccctactgaaaacttgcgattcttcttagttttctgcatacttttcatcacgatgcaggaaacgatttcgagtcaagaagacttttatttatgaacctttgaaaggatcgtcttgtatggtgaattttctaggagcgatgatgtactgtaattttattttaatgtattttgatttatgattatttattagtttttttttaaatgcttgttctaagacatttctgaatgtagaccattttccaaaaaggaaactttattttcaaaaacctaatccgtagtaattcctaatcttggagaataaaaaagggcggtggaggggaaaacattaagaatttattcattatttctcgagtactttcagaaagtctgacactttcattgttgtgccagctggttgaaattaaaactctgatattactttttttgaggatttttatttttgtttttgcttaaacatatagtttgtctagaagtttaaaaagctaaaagttaaaaatggtgtaattatgaaaatctaacactcaagatagtttctaaaaggaaatcagtagttaaggatacctgatttcaaaatatttaaagcataacctaactgatggtaggatgattgtatcttgaatatgtggtagggccacatctattgtaggaaaaccttgcttttatcatctgtgtgtaaagggcttaataaggagaagaggccttttgactgatttgtgagtataaatgcatttgctgtttcatttcaaaaatgttgtggaggaaaagagtacatttaacttgtataagagaatatttgtactcctgtccaggctgcaggacctttcttcgagagctttgcacacttgacttgaaccacattttctgatccctttactttgttttagaagcacactgaaaaatctcgttgtttaaagtacaatttgtaaatatttcaaaggtctaggagtcataacttttgttttcatactgaaaatgatgttgatcagagaaaccaactgttttgcttttcattgctctgtgagaaatttgaggattctgttttgctgttaggtaagctaaactcagaaattgaaaaggaaaagactggataaacacaggattttcagtaagaaaacaaccccagtcttgtcttagaagccacttgttgaggagtctgttgggggaaaaaagaggatatgcttttaaaggtagaacaaaccttcttctgtgttaaatcaaaaggatgttcaaaatccaccaggacagatgctacttgggtttaaatggagccatagatgatacaaagtcctcttggggctgaaaatcacttcctatttgcatggctttactaactggtttctgttttccattatctttttcacagaaagtcttggtcagtatttttccagcatttaaattgaaacggtcagtattagaccactgctaggttatgtagtcaagaaataaaaatagaattacatgctacagatgtctttattctccttccatctagaaaggagttccaaggtcaaattactttttagtgcaatagttaaatgacattttgagatcataactcatatccaaaaagttgcagggaaaattaaaatagctttcccctattaagctaatggcaaacaaaacttaagtggacccccacttccagtggttgtttaggttgcagttgtgaaaatatgctgccaacatttaaaaacttgtttcatatgtatatatgtatacacatatatgaatatgtatgtatatatacatatatgagaacatgtgtgtacacatatatgaatatgtatatatgtgtatgtatgtatatatgtatatgaaatgagagccacatctaaagatttcttaaatcaagtttggttcagcttccttagaactgtggctgtactttttgaggagtacctcatagtactatatttttaatgcatgcaaatcataatagctccaaatgaaccacagttttttcccaatggaggatttttttttaattcttgtactaaaaaaaaaaaatccataccaaatatttttacaaattaagattgatgtaggttttaaaaaaggcatttgtatgttgttagcttacatatggggctaggtaatttcattgcttaaaaagatgcgcctaggctccctcttggtggctggatttctttttcttcgcccgtggtggccatggttcttaatagggccaccggaatcatggtttctttttttttttttttttttgagatggagtctcgccctgtgacccaggctggagtgcagtggcacgatctcggctcactgcaacctctgcctcctgggttcacgccattctcctgtctcagcctcctgagtagctgggactacaggtgaatgccaccacgcccggctgatttttgtatttttagtagagatggggtttcaccatagtggtcaggctgttctcgaactcctgacctcaggtgatccacctgccttggcctcccaaagtgctaggattacaggtgtgagccaccacacccggccccagaataatggtttcttgactttctgtagcccttgttccttagtctgctgtgatatttatgttgacctttatcattttctattctgaacccctcttagcatttaatgtgaaatctaagaaattagaagtagaatggcttttattgttttgacacctttgaaattattattaataatttttccagagcaaaaaagcaaacacgctcaataagactaaacaaaacaaaatataaatgtacatcatttaatgtcccagtggctctattctacctgtaagaaaatgatacaaaaccacctaagatattttgaagcctgacaaatcagcttcatggaaaaaggtaaaaaatgcatttttcaaccgaaagggcagatccaatagaagacccgctccttaaataaacataaaatgtaaaaagttggaaaattaagagtaatgttccatctggaaactgaacttttgtccttgaacttgtgttggcaccaagcctcatacacagtgagctcaataactgttgggacaaaggaaggaaggacaaaatgtgtaacttcccagcatctgggagatgctgtctcttgcctcactgagtgttccttttctttgctctcatgtcattccctgagaacaatgaattctgggacaggctaaacatcatgatgaagtttcttaaacagactttcttagtggaaatccatttagatctgggtgtgctctatggggagtgctgacgtcaaagagcaaatgtctataaggggcccttttaaaatgaacattttcctcattgagcaagctgggattctctaatgtagaaatcaagccatctttataatttcacttcagatgtttatgtttttgttttttttgtctccaatgatggtaaaaataaaaactacgcattacttaaaggagtttccctcacatgtaaacactgttaggaagtctggattaagttgaaagtcctgttttaactttttttctctcatataccaaacactctgtatttctcttaaagaagccctttaagagaaagccctaattttatatctgacagtaaagtttgctgcaagtgtatgagttcaaacacatcccttgttttctgtccctaggggaaaagtcatgtagttttagcttggctccagtgttaatattatattcagtagcagccttagaagagtggtctaagacttgaacctggagcaattttatagcacagaatcctacgaagataggactgtgaacatttgttttctttttcgtgtgtgtcaaactaactggtttttgctttaccaataaaatgtcctcggcagagtaaattttaaacgtgaaaattatagatcttgatattgaatccatcagtgattcaagagatacacctatttgcctaaaacaacctaagatgtattggttatggaatcatgtgttggataggttcttaagacctgtttcctcaaatcttgacacagttttcaagggtggcttattgacttgcacggttgggcagataatccagatttacctaagattgggtaaaaaagtcatctgtgactttgctggcagggcatttgctaagtggagtacaggatctaaaagggttttcttagaaagggcaatattgtccaatgaagtaagcagaaggactctgggttagaagcatctgcacaaaaactggtgagacctactctccactgctctgcagctggatggctgatggcaggctgagcagtggggaagcaggttttaacaacagggagtccttccaggtcactgtatattgagaagaaacataaaactattgtctgttacattccgaggtcagccttcttcttaacgttttataatatgcaaatgccagcttctggaaagcaagtatcatcatgtaccaaatgctttatacaccatcacattcatgaattttttagcatggtcagaacttgtgtaaatatgtctcttagatgattttggggagatgtgatttatttttcatattttcaaaatgcatttcatttcaaataaagttatctattgagacaaccga

SEQ ID NO: 455 - DNA, 2101 bp, Homo sapiens
cgcgcgcggcgaatctcaacgctgcgccgtctgcgggcgcttccgggccaccagtttctctgctttccaccctggcgccccccagccctggctccccagctgcgctgccccgggcgtccacgccctgcgggcttagcgggttcagtgggctcaatctgcgcagcgccacctccatgttgaccaagcctctacaggggcctcccgcgccccccgggacccccacgccgccgccaggaggcaaggatcgggaagcgttcgaggccgagtatcgactcggccccctcctgggtaaggggggctttggcaccgtcttcgcaggacaccgcctcacagatcgactccaggtggccatcaaagtgattccccggaatcgtgtgctgggctggtcccccttgtcagactcagtcacatgcccactcgaagtcgcactgctatggaaagtgggtgcaggtggtgggcaccctggcgtgatccgcctgcttgactggtttgagacacaggagggcttcatgctggtcctcgagcggcctttgcccgcccaggatctctttgactatatcacagagaagggcccactgggtgaaggcccaagccgctgcttctttggccaagtagtggcagccatccagcactgccattcccgtggagttgtccatcgtgacatcaaggatgagaacatcctgatagacctacgccgtggctgtgccaaactcattgattttggttctggtgccctgcttcatgatgaaccctacactgactttgatgggacaagggtgtacagccccccagagtggatctctcgacaccagtaccatgcactcccggccactgtctggtcactgggcatcctcctctatgacatggtgtgtggggacattccctttgagagggaccaggagattctggaagctgagctccacttcccagcccatgtctccccagactgctgtgccctaatccgccggtgcctggcccccaaaccttcttcccgaccctcactggaagagatcctgctggacccctggatgcaaacaccagccgaggatgtacccctcaacccctccaaaggaggccctgcccctttggcctggtccttgctaccctaagcctggcctggcctggcctggcccccaatggtcagaagagccatcccatggccatgtcacagggatagatggacatttgttgacttggttttacaggtcattaccagtcattaaagtccagtattactaaggtaagggattgaggatcaggggttagaagacataaaccaagtctgcccagttcccttcccaatcctacaaaggagccttcctcccagaacctgtggtccctgattctggagggggaacttcttgcttctcattttgctaaggaagtttattttggtgaagttgttcccattctgagccccgggactcttattctgatgatgtgtcaccccacattggcacctcctactaccaccacacaaacttagttcatatgctcttacttgggcaagggtgctttccttccaataccccagtagcttttattttagtaaagggaccctttcccctagcctagggtcccatattgggtcaagctgcttacctgcctcagcccaggattctttattctgggggaggtaatgccctgttgttaccccaaggcttcttttttttttttttttgggtgaggggaccctactctgttatcccaagtgctcttattctggtgagaagaaccttacttccataatttgggaaggaatggaagatggacaccaccggacaccaccagacactaggatgggatggatggttttttgggggatgggctaggggaaataaggcttgctgtttgttctcctggggcgctccctccaacttttgcagattcttgcaacctcctcctgagccgggattgtccaattactaaaatgtaaataatcacgtattgtggggaggggagttccaagtgtgccctcctctcttctcctgcctggattatttaaaaagccatgtgtggaaacccactatttaataaaagtaatagaatcagaaaaaaaaaaaaaaaaaaaaaaaaaaaaaaaaaaaaaaaaaaaaaaaaa

SEQ ID NO: 456 - DNA, 2250 bp, Homo sapiens
tgggagtccgtgctcctgctcctcggttggctcctaagtgccccgccaggtcccctctcctttcgctctcccggctccggctcccgactcttcggcccgctggcatctgcttccctcccctgcctcgtttctcgtcgcccctgctcgctccccccggcgctcgcccgggcgctgtgctcgctcctggatcgccagccgcgcagccgggctcggccggccgcccgcgcgccactgtgcagtggagtttggtggaatctctgctgacgtcacgtcactccccacacggagtaggagcagagggaagagagagggatgagagggagggagaggagagagagtgcgagaccgagcgagaaagctggagaggagcagaaagaaactgccagtggcggctagatttcggaggccccagtgcacccgtggactccttcggaacttggcaccctcaggagccctgcagtcctctcaggcccggctttcgggcgcttgccgtgcagccggaggctcggctcgctggaaatcgccccgggaagcagtgggacgcggagacagcagctctctcccggtagccgataacggggaatggagaccaactgccgcaaactggtgtcggcgtgtgtgcaattaggcgtgcagccggcggccgttgaatgtctcttctccaaagactccgaaatcaaaaaggtcgagttcacggactctcctgagagccgaaaagaggcagccagcagcaagttcttcccgcggcagcatcctggcgccaatgagaaagataaaagccagcaggggaagaatgaggacgtgggcgccgaggacccgtctaagaagaagcggcaaaggcggcagcggactcactttaccagccagcagctccaggagctggaggccactttccagaggaaccgctacccggacatgtccacacgcgaagaaatcgctgtgtggaccaaccttacggaagcccgagtccgggtttggttcaagaatcgtcgggccaaatggagaaagagggagcgcaaccagcaggccgagctatgcaagaatggcttcgggccgcagttcaatgggctcatgcagccctacgacgacatgtacccaggctattcctacaacaactgggccgccaagggccttacatccgcctccctatccaccaagagcttccccttcttcaactctatgaacgtcaaccccctgtcatcacagagcatgttttccccacccaactctatctcgtccatgagcatgtcgtccagcatggtgccctcagcagtgacaggcgtcccgggctccagtctcaacagcctgaataacttgaacaacctgagtagcccgtcgctgaattccgcggtgccgacgcctgcctgtccttacgcgccgccgactcctccgtatgtttatagggacacgtgtaactcgagcctggccagcctgagactgaaagcaaagcagcactccagcttcggctacgccagcgtgcagaacccggcctccaacctgagtgcttgccagtatgcagtggaccggcccgtgtgagccgcacccacagcgccgggatcctaggaccttgccggatggggcaactccgcccttgaaagactgggaattatgctagaaggtcgtgggcactaaagaaagggagagaaagagaagctatatagagaaaaggaaaccactgaatcaaagagagagctcctttgatttcaaagggatgtcctcagtgtctgacatctttcactacaagtatttctaacagttgcaaggacacatacacaaacaaatgtttgactggatatgacattttaacattactataagcttgttattttttaagtttagcattgttaacatttaaatgactgaaaggatgtatatatatcgaaatgtcaaattaattttataaaagcagttgttagtaatatcacaacagtgtttttaaaggttaggctttaaaataaagcatgttatacagaagcgattaggatttttcgcttgcgagcaagggagtgtatatactaaatgccacactgtatgtttctaacatattattattattataaaaaatgtgtgaatatcagttttagaatagtttctctggtggatgcaatgatgtttctgaaactgctatgtacaacctaccctgtgtataacatttcgtacaatattattgttttacttttcagcaaatatgaaacaaatgtgttttatttcatgggagtaaaatatactgcatacaaaaaaaaaaaaaaa

SEQ ID NO: 457 - DNA, 2337 bp, Homo sapiens
gttaggccaacagggaagcgcggagccgcagatctggtccgtcgctcgcctgggtgcctggagctgagctgcggcaaggcccggctcctgttcgaccgcccgaggggtgtgcgtgtgcgcgttgcggagggtgcgctcagagggccgcgtcgtggctgcagcggctgctgccgccgcaggggatctaatatcacctacctgtccctgtcactcttgacacttctctgtcagggctgccgcgtggggggggggcgggcagagcgcggtcggcgttagctttccttattggaggggttcttgggggagggagggagagaagaagggggtctttgcccactcttgtttcgctttggagcttggaagcctgctccctaaagacgctctgagtggtgcccttctgcccacatcccatgtcttcgtttgcccgctgactttccgtctccggactttttcgcttgagccttccggaggagacgggggcagcttggcttgagaactcggcgggggttgcgtcccctggctctccccgcagcggggaaactccgcgcctagagcgcgacccggagcgggcagcggcggctacgggggctcggcggggcagtagccaaggactagtagagcgtcgcgctccctcgtccatgaactgcatgaaaggcccgcttcacttggagcaccgagcagcggggaccaagctgtcggccgtctcctcatcttcctgtcaccatccccagccgttagccatggcttcggttctggctcccggtcagccccggtcgctggactcctccaagcacaggctggaggtgcacaccatctccgacacctccagcccggaggccgcagagaaagataaaagccagcaggggaagaatgaggacgtgggcgccgaggacccgtctaagaagaagcggcaaaggcggcagcggactcactttaccagccagcagctccaggagctggaggccactttccagaggaaccgctacccggacatgtccacacgcgaagaaatcgctgtgtggaccaaccttacggaagcccgagtccgggtttggttcaagaatcgtcgggccaaatggagaaagagggagcgcaaccagcaggccgagctatgcaagaatggcttcgggccgcagttcaatgggctcatgcagccctacgacgacatgtacccaggctattcctacaacaactgggccgccaagggccttacatccgcctccctatccaccaagagcttccccttcttcaactctatgaacgtcaaccccctgtcatcacagagcatgttttccccacccaactctatctcgtccatgagcatgtcgtccagcatggtgccctcagcagtgacaggcgtcccgggctccagtctcaacagcctgaataacttgaacaacctgagtagcccgtcgctgaattccgcggtgccgacgcctgcctgtccttacgcgccgccgactcctccgtatgtttatagggacacgtgtaactcgagcctggccagcctgagactgaaagcaaagcagcactccagcttcggctacgccagcgtgcagaacccggcctccaacctgagtgcttgccagtatgcagtggaccggcccgtgtgagccgcacccacagcgccgggatcctaggaccttgccggatggggcaactccgcccttgaaagactgggaattatgctagaaggtcgtgggcactaaagaaagggagagaaagagaagctatatagagaaaaggaaaccactgaatcaaagagagagctcctttgatttcaaagggatgtcctcagtgtctgacatctttcactacaagtatttctaacagttgcaaggacacatacacaaacaaatgtttgactggatatgacattttaacattactataagcttgttattttttaagtttagcattgttaacatttaaatgactgaaaggatgtatatatatcgaaatgtcaaattaattttataaaagcagttgttagtaatatcacaacagtgtttttaaaggttaggctttaaaataaagcatgttatacagaagcgattaggatttttcgcttgcgagcaagggagtgtatatactaaatgccacactgtatgtttctaacatattattattattataaaaaatgtgtgaatatcagttttagaatagtttctctggtggatgcaatgatgtttctgaaactgctatgtacaacctaccctgtgtataacatttcgtacaatattattgttttacttttcagcaaatatgaaacaaatgtgttttatttcatgggagtaaaatatactgcatacaaaaaaaaaaaaaaaaaaaaaaaaa

SEQ ID NO: 458 - DNA, 2122 bp, Homo sapiens
tgggagtccgtgctcctgctcctcggttggctcctaagtgccccgccaggtcccctctcctttcgctctcccggctccggctcccgactcttcggcccgctggcatctgcttccctcccctgcctcgtttctcgtcgcccctgctcgctccccccggcgctcgcccgggcgctgtgctcgctcctggatcgccagccgcgcagccgggctcggccggccgcccgcgcgccactgtgcagtggagtttggtggaatctctgctgacgtcacgtcactccccacacggagtaggagcagagggaagagagagggatgagagggagggagaggagagagagtgcgagaccgagcgagaaagctggagaggagcagaaagaaactgccagtggcggctagatttcggaggccccagtgcacccgtggactccttcggaacttggcaccctcaggagccctgcagtcctctcaggcccggctttcgggcgcttgccgtgcagccggaggctcggctcgctggaaatcgccccgggaagcagtgggacgcggagacagcagctctctcccggtagccgataacggggaatggagaccaactgccgcaaactggtgtcggcgtgtgtgcaattagagaaagataaaagccagcaggggaagaatgaggacgtgggcgccgaggacccgtctaagaagaagcggcaaaggcggcagcggactcactttaccagccagcagctccaggagctggaggccactttccagaggaaccgctacccggacatgtccacacgcgaagaaatcgctgtgtggaccaaccttacggaagcccgagtccgggtttggttcaagaatcgtcgggccaaatggagaaagagggagcgcaaccagcaggccgagctatgcaagaatggcttcgggccgcagttcaatgggctcatgcagccctacgacgacatgtacccaggctattcctacaacaactgggccgccaagggccttacatccgcctccctatccaccaagagcttccccttcttcaactctatgaacgtcaaccccctgtcatcacagagcatgttttccccacccaactctatctcgtccatgagcatgtcgtccagcatggtgccctcagcagtgacaggcgtcccgggctccagtctcaacagcctgaataacttgaacaacctgagtagcccgtcgctgaattccgcggtgccgacgcctgcctgtccttacgcgccgccgactcctccgtatgtttatagggacacgtgtaactcgagcctggccagcctgagactgaaagcaaagcagcactccagcttcggctacgccagcgtgcagaacccggcctccaacctgagtgcttgccagtatgcagtggaccggcccgtgtgagccgcacccacagcgccgggatcctaggaccttgccggatggggcaactccgcccttgaaagactgggaattatgctagaaggtcgtgggcactaaagaaagggagagaaagagaagctatatagagaaaaggaaaccactgaatcaaagagagagctcctttgatttcaaagggatgtcctcagtgtctgacatctttcactacaagtatttctaacagttgcaaggacacatacacaaacaaatgtttgactggatatgacattttaacattactataagcttgttattttttaagtttagcattgttaacatttaaatgactgaaaggatgtatatatatcgaaatgtcaaattaattttataaaagcagttgttagtaatatcacaacagtgtttttaaaggttaggctttaaaataaagcatgttatacagaagcgattaggatttttcgcttgcgagcaagggagtgtatatactaaatgccacactgtatgtttctaacatattattattattataaaaaatgtgtgaatatcagttttagaatagtttctctggtggatgcaatgatgtttctgaaactgctatgtacaacctaccctgtgtataacatttcgtacaatattattgttttacttttcagcaaatatgaaacaaatgtgttttatttcatgggagtaaaatatactgcatacaaaaaaaaaaaaaaaaaaaaaaaaa

SEQ ID NO: 459 - DNA, 2402 bp, Homo sapiens
ggcggtcggagatccgagagctctgcttctctgaaaagcgtgtggctttctggacttgtttcaggccacccacgagccagcgggaaaggattgccagccagagaaagacgaactccgaagtcccaatgcacagatcagcccccagtcaaaccaccaagaggagccgatcgccattttccactactcgtcgtagttgggacgacagcgagagttcgggaaccaacctgaatattgataatgaggactattccaggtatccgccaagagagtacagagcttcgggtagcagaagaggaatggcctatggacatattgactcttatggggcagatgatagtgaggaggagggggctgggcctgttgagcgaccgccagtgagagggaaaactggcaagtttaaagatgataagctgtatgacccagagaaaggggcaaggtctttggctgggccacctccacatttctctagttttagccgtgatgtgagagaggagcgagacaagttagacccagtccctgcagcaagatgctcagctagcagagctgacttcctgccacaaagtagtgtggcctcacagtcgtcttctgaaggcaagctggctacaaaaggtgacagctcggagagggagagaagggagcaaaatttacctgcacgtcccagcagggctcctgtgagtatttgtggtggtggggaaaacacctcaaagagtgcagaggaacctgtggtcaggcccaaaatcagaaacctggcaagtccaaactgcgtgaaaccaaaaattttttttgatactgatgatgatgacgatatgccacacagtacttccaggtggagggataccgccaatgacaatgagggccactcggatggcctggcaagaagagggagaggcgagagttcaagtggctatcccgagccaaagtaccctgaagacaaacgggaagcgaggagtgaccaagtgaaaccagaaaaggtgccgagacgacgacgcaccatggccgaccctgacttctggacgcacagtgatgattactacaaatactgcgacgaagactctgacagtgacaaagagtggattgctgctctgcgtcggaaatatcgaagccgagagcaaaccctgtcctccagtggcgaaagctgggagactctgccggggaaagaagagcgggaacctccacaggctaaggtgagtgccagcactggcaccagccctggccccggtgctagtgccagtgccggggctggcgccggggccagtgctggcagcaatggcagcaattaccttgaagaagttcgagaaccatctcttcaggaagagcaggcatccctggaagaaggagaaattccttggctccagtaccatgagaatgacagtagcagtgagggggataatgattctggtcacgagttgatgcaacctggggtattcatgctggatggaaacaacaaccttgaagatgactccagtgtgagcgaagacctagaagtggattggagcctctttgatggatttgcagatgggttaggagtggctgaagccatttcctatgtggaccctcagttcctcacctacatggcacttgaagaacgcctggcccaggcaatggaaactgcccttgcgcacttggagtctctcgcagtggatgtagaggtggccaatccaccagcaagcaaggagagcattgacgctcttcccgagatcctggtcactgaagatcatggcgcagttggtcaggagatgtgctgccccatctgctgtagcgaatatgtgaagggggaggtggcaactgagctgccgtgccaccactatttccacaagccgtgtgtgtccatctggcttcagaagtcaggcacctgccccgtgtgccgctgcatgttccctcccccactctaaagaccaaggccgtttactcctggtctgattattttccccatctgaaatccacaatactgcaggagccctcttgaaattaacaatggaaataaaaccaatcagtcagttagcctaaacctattgattcctcgtgattatttccaatgtgaaaacagttgtgtatgattgcattaaaaatcatatcatcttttagaggttagaaaagggaaaactaaactttctaaatgctacttgagattgcagtaagaagatacgttttctaacctgaaagttaaatcgcatttgttttcttcagtagaatgggaatgtgttgctgttacttgtaatgtcaagtttatctgttaaatatgtccaaaaggcaaaatcatttttgttgcatgttatgggtcgatgttcctgtaattgcagtgccgtaaaagcttattaaagttgttcttttggttttaaaaaaaaaaaaaaaaaaaaaaaaaaaaaaaaaaaaaaaaaaaaaaaaaaaaaaaaaaaaaaaaa

SEQ ID NO: 460 - DNA, 2728 bp, Homo sapiens
ggcggtcggagatccgagagctctgcttctctgaaaagcgtgtggctttctggacttggtctacacctgacagtcactggaatgctactccaggccttagaagaaagtgaaactaattttaaaggccccttattctttctgttacctgcctgctgaagtgaaaataaatctccctgctcctttattctaaactgattttactttcccatctcaaaaacgtgtgcagggagcaggagccctcctacccgagccccagctgtattggaaaccctcctaagtcagagtgatgggtcaggaatctagcaagcctgtatggcccaatccaacaggagggtatcagtccaatacaggtaggaggtatggaagaaggcatgcttatgtcagtttcaggccacccacgagccagcgggaaaggattgccagccagagaaagacgaactccgaagtcccaatgcacagatcagcccccagtcaaaccaccaagaggagccgatcgccattttccactactcgtcgtagttgggacgacagcgagagttcgggaaccaacctgaatattgataatgaggactattccaggtatccgccaagagagtacagagcttcgggtagcagaagaggaatggcctatggacatattgactcttatggggcagatgatagtgaggaggagggggctgggcctgttgagcgaccgccagtgagagggaaaactggcaagtttaaagatgataagctgtatgacccagagaaaggggcaaggtctttggctgggccacctccacatttctctagttttagccgtgatgtgagagaggagcgagacaagttagacccagtccctgcagcaagatgctcagctagcagagctgacttcctgccacaaagtagtgtggcctcacagtcgtcttctgaaggcaagctggctacaaaaggtgacagctcggagagggagagaagggagcaaaatttacctgcacgtcccagcagggctcctgtgagtatttgtggtggtggggaaaacacctcaaagagtgcagaggaacctgtggtcaggcccaaaatcagaaacctggcaagtccaaactgcgtgaaaccaaaaattttttttgatactgatgatgatgacgatatgccacacagtacttccaggtggagggataccgccaatgacaatgagggccactcggatggcctggcaagaagagggagaggcgagagttcaagtggctatcccgagccaaagtaccctgaagacaaacgggaagcgaggagtgaccaagtgaaaccagaaaaggtgccgagacgacgacgcaccatggccgaccctgacttctggacgcacagtgatgattactacaaatactgcgacgaagactctgacagtgacaaagagtggattgctgctctgcgtcggaaatatcgaagccgagagcaaaccctgtcctccagtggcgaaagctgggagactctgccggggaaagaagagcgggaacctccacaggctaaggtgagtgccagcactggcaccagccctggccccggtgctagtgccagtgccggggctggcgccggggccagtgctggcagcaatggcagcaattaccttgaagaagttcgagaaccatctcttcaggaagagcaggcatccctggaagaaggagaaattccttggctccagtaccatgagaatgacagtagcagtgagggggataatgattctggtcacgagttgatgcaacctggggtattcatgctggatggaaacaacaaccttgaagatgactccagtgtgagcgaagacctagaagtggattggagcctctttgatggatttgcagatgggttaggagtggctgaagccatttcctatgtggaccctcagttcctcacctacatggcacttgaagaacgcctggcccaggcaatggaaactgcccttgcgcacttggagtctctcgcagtggatgtagaggtggccaatccaccagcaagcaaggagagcattgacgctcttcccgagatcctggtcactgaagatcatggcgcagttggtcaggagatgtgctgccccatctgctgtagcgaatatgtgaagggggaggtggcaactgagctgccgtgccaccactatttccacaagccgtgtgtgtccatctggcttcagaagtcaggcacctgccccgtgtgccgctgcatgttccctcccccactctaaagaccaaggccgtttactcctggtctgattattttccccatctgaaatccacaatactgcaggagccctcttgaaattaacaatggaaataaaaccaatcagtcagttagcctaaacctattgattcctcgtgattatttccaatgtgaaaacagttgtgtatgattgcattaaaaatcatatcatcttttagaggttagaaaagggaaaactaaactttctaaatgctacttgagattgcagtaagaagatacgttttctaacctgaaagttaaatcgcatttgttttcttcagtagaatgggaatgtgttgctgttacttgtaatgtcaagtttatctgttaaatatgtccaaaaggcaaaatcatttttgttgcatgttatgggtcgatgttcctgtaattgcagtgccgtaaaagcttattaaagttgttcttttggttttaaaaaaaaaaaaaaaaaaaaaaaaaaaaaaaaaaaaaaaaaaaaaaaaaaaaaaaaaaaaaaaaa

SEQ ID NO: 461 - DNA, 2182 bp, Homo sapiens
gccgcccgccccgctgctgtctggcgggggaggagctcgggaccgggagcagcggctctggcggtcgtggcggtcggagatccgagagctctgcttctctgaaaagcgtgtggctttctggacttggtctacacctgacagtcactggaatgctactccaggccttagaagaaagtgaaactaattttaaaggccccttattctttctgttacctgcctgctgaagtgaaaataaatctccctgctcctttattctaaactgattttactttcccatctcaaaaacgtgtgcagggagcaggagccctcctacccgagccccagctgtattggaaaccctcctaagtcagagtgatgggtcaggaatctagcaagcctgtatggcccaatccaacaggagggtatcagtccaatacaggtaggaggtatggaagaaggcatgcttatgtcagtttcaggccacccacgagccagcgggaaaggattgccagccagagaaagacgaactccgaagtcccaatgcacagatcagcccccagtcaaaccaccaagaggagccgatcgccattttccactactcgtcgtagttgggacgacagcgagagttcgggaaccaacctgaatattgataatgaggactattccagtacttccaggtggagggataccgccaatgacaatgagggccactcggatggcctggcaagaagagggagaggcgagagttcaagtggctatcccgagccaaagtaccctgaagacaaacgggaagcgaggagtgaccaagtgaaaccagaaaaggtgccgagacgacgacgcaccatggccgaccctgacttctggacgcacagtgatgattactacaaatactgcgacgaagactctgacagtgacaaagagtggattgctgctctgcgtcggaaatatcgaagccgagagcaaaccctgtcctccagtggcgaaagctgggagactctgccggggaaagaagagcgggaacctccacaggctaaggtgagtgccagcactggcaccagccctggccccggtgctagtgccagtgccggggctggcgccggggccagtgctggcagcaatggcagcaattaccttgaagaagttcgagaaccatctcttcaggaagagcaggcatccctggaagaaggagaaattccttggctccagtaccatgagaatgacagtagcagtgagggggataatgattctggtcacgagttgatgcaacctggggtattcatgctggatggaaacaacaaccttgaagatgactccagtgtgagcgaagacctagaagtggattggagcctctttgatggatttgcagatgggttaggagtggctgaagccatttcctatgtggaccctcagttcctcacctacatggcacttgaagaacgcctggcccaggcaatggaaactgcccttgcgcacttggagtctctcgcagtggatgtagaggtggccaatccaccagcaagcaaggagagcattgacgctcttcccgagatcctggtcactgaagatcatggcgcagttggtcaggagatgtgctgccccatctgctgtagcgaatatgtgaagggggaggtggcaactgagctgccgtgccaccactatttccacaagccgtgtgtgtccatctggcttcagaagtcaggcacctgccccgtgtgccgctgcatgttccctcccccactctaaagaccaaggccgtttactcctggtctgattattttccccatctgaaatccacaatactgcaggagccctcttgaaattaacaatggaaataaaaccaatcagtcagttagcctaaacctattgattcctcgtgattatttccaatgtgaaaacagttgtgtatgattgcattaaaaatcatatcatcttttagaggttagaaaagggaaaactaaactttctaaatgctacttgagattgcagtaagaagatacgttttctaacctgaaagttaaatcgcatttgttttcttcagtagaatgggaatgtgttgctgttacttgtaatgtcaagtttatctgttaaatatgtccaaaaggcaaaatcatttttgttgcatgttatgggtcgatgttcctgtaattgcagtgccgtaaaagcttattaaagttgttcttttggttttacatggtaaaaaaaa

SEQ ID NO: 462 - DNA, 1758 bp, Homo sapiens
cacgagcggcacgaggatttccagctcagcgatgcccccaggtccctgggagagctgcttctgggtggggggcctcattttgtggctcagcgttggaagttcaggggatgcacctcctaccccacagccaaagtgcgctgacttccagagcgccaacctttttgaaggcaccgatctcaaagtccagtttctcctctttgtcccttcgaatcctagctgtgggcagctagtagaaggaagcagtgacctccaaaactctgggttcaatgccactctgggaaccaaactaattatccatggattcagggttttaggaacaaagccttcctggattgacacatttattagaacccttctgcgtgcaacgaatgctaatgtgattgccgtggactggatttatgggtctacaggagtctacttctcagctgtgaaaaatgtgattaagttgagcctcgagatctcccttttcctcaataaactcctggtgctgggtgtgtcggaatcctcaatccacatcattggtgttagcctgggggcccacgttgggggcatggtgggacagctcttcggaggccagctgggacagatcacaggcctggaccccgctggacctgagtacaccagggccagtgtggaagagcgcttggatgctggagatgccctcttcgtggaagccatccacacagacaccgacaatttgggtattcggattcccgttggacatgtggactacttcgtcaacggaggccaagaccaacctggctgccccaccttcttttacgcaggttatagttatctgatctgtgatcacatgagggctgtgcacctctacatcagcgccctggagaattcctgtccactgatggcctttccctgtgccagctacaaggccttccttgctggacgctgtctggattgctttaacccttttctgctttcctgcccaaggataggactggtggaacaaggtggtgtcaagatagagccgctccccaaggaagtgaaagtctacctcctgactacttccagtgctccgtactgcatgcatcacagcctcgtggagtttcacttgaaggaactgagaaacaaggacaccaacatcgaggttaccttccttagcagtaacatcacctcttcatctaagatcaccatacctaagcagcaacgctatgggaaaggaatcatagcccatgccaccccacaatgccagataaaccaagtgaaattcaagtttcagtcttccaaccgagtttggaaaaaagaccggactaccattattgggaagttctgcactgcccttttgcctgtcaatgacagagaaaagatggtctgcttacctgaaccagtgaacttacaagcaagtgtgactgtttcctgtgacctgaagatagcctgtgtgtagtttaacctgggcaggacacatctccctgcattttttttttttttttttgagagagaggtgtgatgagggatgtgtgtgtgcagcttattgtagaccattactactaaggagaaaagcaaagctctttcttattttcctcataatcagctaccctggaggggagggagaactcattttacagaacttggtttcctttgccgatcttatgtacatacccattttagctttcccatgcatacttaactgcacttgctttatctccttgggcattcgtacttaggattcaatagaaacatgtacagggtaaacaattttttaaaaataaaacttcatggagtaaaaaaaaaaaaaaaaaa

SEQ ID NO: 463 - DNA, 2360 bp, Homo sapiens
acagtgcggagaccgcagccccggagcccgggccagggtccacctgtccccgcagcgccggctcgcgccctcctgccgcagccaccgagccgccgtctagcgccccgacctcgccaccatgagagccctgctggcgcgcctgcttctctgcgtcctggtcgtgagcgactccaaaggcagcaatgaacttcatcaagttccatcgaactgtgactgtctaaatggaggaacatgtgtgtccaacaagtacttctccaacattcactggtgcaactgcccaaagaaattcggagggcagcactgtgaaatagataagtcaaaaacctgctatgaggggaatggtcacttttaccgaggaaaggccagcactgacaccatgggccggccctgcctgccctggaactctgccactgtccttcagcaaacgtaccatgcccacagatctgatgctcttcagctgggcctggggaaacataattactgcaggaacccagacaaccggaggcgaccctggtgctatgtgcaggtgggcctaaagccgcttgtccaagagtgcatggtgcatgactgcgcagatggaaaaaagccctcctctcctccagaagaattaaaatttcagtgtggccaaaagactctgaggccccgctttaagattattgggggagaattcaccaccatcgagaaccagccctggtttgcggccatctacaggaggcaccgggggggctctgtcacctacgtgtgtggaggcagcctcatcagcccttgctgggtgatcagcgccacacactgcttcattgattacccaaagaaggaggactacatcgtctacctgggtcgctcaaggcttaactccaacacgcaaggggagatgaagtttgaggtggaaaacctcatcctacacaaggactacagcgctgacacgcttgctcaccacaacgacattgccttgctgaagatccgttccaaggagggcaggtgtgcgcagccatcccggactatacagaccatctgcctgccctcgatgtataacgatccccagtttggcacaagctgtgagatcactggctttggaaaagagaattctaccgactatctctatccggagcagctgaaaatgactgttgtgaagctgatttcccaccgggagtgtcagcagccccactactacggctctgaagtcaccaccaaaatgctgtgtgctgctgacccacagtggaaaacagattcctgccagggagactcagggggacccctcgtctgttccctccaaggccgcatgactttgactggaattgtgagctggggccgtggatgtgccctgaaggacaagccaggcgtctacacgagagtctcacacttcttaccctggatccgcagtcacaccaaggaagagaatggcctggccctctgagggtccccagggaggaaacgggcaccacccgctttcttgctggttgtcatttttgcagtagagtcatctccatcagctgtaagaagagactgggaagataggctctgcacagatggatttgcctgtgccacccaccagggcgaacgacaatagctttaccctcaggcataggcctgggtgctggctgcccagacccctctggccaggatggaggggtggtcctgactcaacatgttactgaccagcaacttgtctttttctggactgaagcctgcaggagttaaaaagggcagggcatctcctgtgcatgggtgaagggagagccagctcccccgacggtgggcatttgtgaggcccatggttgagaaatgaataatttcccaattaggaagtgtaacagctgaggtctcttgagggagcttagccaatgtgggagcagcggtttggggagcagagacactaacgacttcagggcagggctctgatattccatgaatgtatcaggaaatatatatgtgtgtgtatgtttgcacacttgtgtgtgggctgtgagtgtaagtgtgagtaagagctggtgtctgattgttaagtctaaatatttccttaaactgtgtggactgtgatgccacacagagtggtctttctggagaggttataggtcactcctggggcctcttgggtcccccacgtgacagtgcctgggaatgtattattctgcagcatgacctgtgaccagcactgtctcagtttcactttcacatagatgtccctttcttggccagttatcccttccttttagcctagttcatccaatcctcactgggtggggtgaggaccactcctgtacactgaatatttatatttcactatttttatttatatttttgtaattttaaataaaagtgatcaataaaatgtgatttttctgatgaaaaaaaaaaaaaaa

SEQ ID NO: 464 - DNA, 3226 bp, Homo sapiens
gccgccccgcgagcctccagcccctcgcctgttgccgcgcgagtcccgggcccggagcgctaggagcgcgcggaaggagccatggctctggacgggataaggatgccagatggctgctacgcggacgggacgtgggaactgagtgtccatgtgacggacctgaaccgcgatgtcaccctgagagtgaccggcgaggtgcacattggaggcgtgatgcttaagctggtggagaaactcgatgtaaaaaaagattggtctgaccatgctctctggtgggaaaagaagagaacttggcttctgaagacacattggaccttagataagtatggtattcaggcagatgctaagcttcagttcacccctcagcacaaactgctccgcctgcagcttcccaacatgaagtatgtgaaggtgaaagtgaatttctctgatagagtcttcaaagctgtttctgacatctgtaagacttttaatatcagacaccccgaagaactttctctcttaaagaaacccagagatccaacaaagaaaaaaaagaagaagctagatgaccagtctgaagatgaggcacttgaattagaggggcctcttatcactcctggatcaggaagtatatattcaagcccaggactgtatagtaaaacaatgacccccacttatgatgctcatgatggaagccccttgtcaccaacttctgcttggtttggtgacagtgctttgtcagaaggcaatcctggtatacttgctgtcagtcaaccaatcacgtcaccagaaatcttggcaaaaatgttcaagcctcaagctcttcttgataaagcaaaaatcaaccaaggatggcttgattcctcaagatctctcatggaacaagatgtgaaggaaaatgaggccttgctgctccgattcaagtattacagcttttttgatttgaatccaaagtatgatgcaatcagaatcaatcagctttatgagcaggccaaatgggccattctcctggaagagattgaatgcacagaagaagaaatgatgatgtttgcagccctgcagtatcatatcaataagctgtcaatcatgacatcagagaatcatttgaacaacagtgacaaagaagttgatgaagttgatgctgccctttcagacctggagattactctggaagggggtaaaacgtcaacaattttgggtgacattacttccattcctgaacttgctgactacattaaagttttcaagccaaaaaagctgactctgaaaggttacaaacaatattggtgcaccttcaaagacacatccatttcttgttataagagcaaagaagaatccagtggcacaccagctcatcagatgaacctcaggggatgtgaagttaccccagatgtaaacatttcaggccaaaaatttaacattaaactcctgattccagttgcagaaggcatgaatgaaatctggcttcgttgtgacaatgaaaaacagtatgcacactggatggcagcctgcagattagcctccaaaggcaagaccatggcggacagttcttacaacttagaagttcagaatattctttcctttctgaagatgcagcatttaaacccagatcctcagttaataccagagcagatcacgactgatataactcctgaatgtttggtgtctccccgctatctaaaaaagtataagaacaagcagataacagcgagaatcttggaggcccatcagaatgtagctcagatgagtctaattgaagccaagatgagatttattcaagcttggcagtcactacctgaatttggcatcactcacttcattgcaaggttccaagggggcaaaaaagaagaacttattggaattgcatacaacagactgattcggatggatgccagcactggagatgcaattaaaacatggcgtttcagcaacatgaaacagtggaatgtcaactgggaaatcaaaatggtcaccgtagagtttgcagatgaagtacgattgtccttcatttgtactgaagtagattgcaaagtggttcatgaattcattggtggctacatatttctctcaacacgtgcaaaagaccaaaacgagagtttagatgaagagatgttctacaaacttaccagtggttgggtgtgaatagaaatactgtttaatgaaactccacggccataacaatatttaactttaaaagctgtttgttatatgctgcttaataaagtaagcttgaaatttatcattttatcatgaaaacttctttgccttaccagaccagttaatatgtgcactaaacaagcacgactattaatctatcatgttatgatataataaacttgaatttggcacacattccttagggccatgaattgaaaactgaaatagtgggcaaatcaggaacaaaccatcactgatttactgatttaagctagccaaactgtaagaaacaagccatctattttaaagctatccagggcttaacctatatgaactctatttatcatgtctaatgcatgtgatttaatgtatgtttaatttgatatcatgttttaaaatatcctacttctggtagccatttaattcctccccctacccccaaataaatcaggcatgcaggaggcctgatatttagtaatgtcattgtgtttgaccttgaaggaaaatgctattagtccgtcgtgcttgatttgtttttgtccttgaataagcatgttatgtatattgtctcgtgtttttatttttacaccatattgtattacacttttagtattcaccagcataatcactgtctgcctaaaatatgcaactctttgcattacaatatgaagtaaagttctatgaagtatgcattttgtgtaactaatgtaaaaacacaaattttataaaattgtacagttttttaaaaactactcacaactagcagatggcttaaatgtagcaatctctgcgttaattaaatgcctttaagagatataattaacgtgcagttttaatatctactaaattaagaatgacttcattatgatcatgatttgccacaatgtccttaactctaatgcctggactggccatgttctagtctgttgcgctgttacaatctgtattggtgctagtcagaaaattcctagctcacatagcccaaaagggtgcgagggagaggtggattaccagtattgttcaataatccatggttcaaagactgtataaatgcattttattttaaataaaagcaaaacttttattt

SEQ ID NO: 465 - DNA, 2881 bp, Homo sapiens
agcgcctcgcgggggtctggcccggagtggagggcgcgcggtcccagccctcccgctcggccggcgggtgtcgagttcagccctaggggacctctttctcctggacattgaagatatggccctttggaggtgacccaggagagaagggatgaaggcctttggtcctccacatgagggccccctccaaggactcgtggcctcccgcattgagacttatgggggccggcatcgagcctctgctcagagcactactggcagactctatccccgaggataccctgtgctggatcccagtcgccgacgcctccagcagtatgtcccctttgccaggggttctggccaggcccgaggcctgtcacccatgagactgcgagatccagagcccgagaagaggcacgggggccatgtgggggctggcctgcttcactcccccaaactcaaggaactcaccaaggcccatgagctggaggtgaggctgcacactttcagcatgtttgggatgccccggctgccccctgaggaccggcggcactgggagataggagagggtggcgacagtggcctgaccatcgagaagtcctggagggagctggtgcctgggcacaaggagatgagccaggagctctgccaccaacaggaggccctgtgggagctcctgaccaccgagctgatctacgtgagaaagctcaagatcatgactgatctgctagccgccggcctgctgaacctgcagcgagtgggactgctgatggaagtgtcagctgagaccctgtttggaaatgtccccagcctgattcgaacccaccggagcttttgggatgaggtgctggggcccaccctggaggagactcgggcctcgggccagcctctggaccccattggtctgcaaagtggcttcctgacgtttggccagcggttccacccctatgtccagtactgcctccgagtgaagcagaccatggcttacgcccgagaacagcaagaaactaaccctctcttccatgccttcgtgcagtggtgtgagaagcacaagcgctctgggaggcagatgctctgtgacttgcttatcaagccccaccagcgcatcaccaagtacccactgctgctccatgctgtgctcaagaggagccccgaggcacgagcccaagaggccctgaatgccatgattgaagccgtggagtcattcctgcgacatatcaatgggcaggtccgccagggcgaagagcaagagagcttggcggctgcagcacaacgcatcgggccctacgaggtgctggagccacccagtgatgaggtggagaagaacctgcgcccattctccaccctggacctgacgtcccccatgctgggggttgcatctgagcacaccagacagctgctgctggaggggcctgtgcgagtgaaggagggacgagaagggaagctggacgtgtacctgttcctcttctctgatgtgctccttgtgaccaagccccagcgcaaggcggacaaagccaaggtcatccgaccccctctcatgctggataagctcgtgtgccaacccctgcgagaccccaacagcttcctgctgatccacctcactgaattccagtgtgtctccagcgccctccttgtgcactgtcccagtcctacagaccgtgcccagtggctggagaagacccagcaggcccaggccgccctacagaagctgaaggcagaggagtatgttcaacagaagagggagctcctgaccctctatcgggaccaggacagggagtcccccagcaccaggccctccacgccttccctggagggctctcagagcagcgcagaggggaggactcctgagttctcgaccattatcccccacctggtggtgacagaagacacagatgaagatgctccccttgtgccagatgatacctcagactctggctacggcactttgatcccaggcacccccacggggtcccgctccccactgagccgtctacgccaaagagcccttcggcgggaccctcgcctcaccttctccaccctggaactccgggacatccctctgcgtccccaccctcccgacccccaagctccccaacgccgaagcgcccccgaactgccggaaggaatcctaaaaggaggcagtcttccccaggaagacccaccaacctggtctgaggaagaagatggggcctccgagcgagggaatgtggtggtggaaacactccacagggcccggcttcggggccagcttccctcctccccaacccatgctgactctgccggggaaagcccctgggagtcctcaggggaggaggaagaagaggggcctctgttcctgaaagctggccacacatccctgcgcccaatgcgggctgaggacatgctcagagagatccgggaggagctggccagccaaaggattgagggggccgaggagccccgggacagcaggccacggaagctgactcgggcccagctgcagaggatgcgggggccccacatcattcagctggacacccctctgtccgcatcagaggtatgaggaatgcagaggacctttggcatgcatctctcccagaggagatctctccccagtagtgctggtcaccctccggcatctgtgactctacctcaaggaccacatttcccaaaggaagcctggcccaggcaccctgcctcctgctctgtttggggatcaagaactgtaaatttatgtatcataggtgcacctgagccccacagaaagttgtgcataaaaatgactgccctggctgggcatggctgcctgtaatcccagcactttgggaggctgaggtgggaggatcccttgagcccaggagttccagaccagcctgggcaatatagggaaaccctgtctttacaaaaaaaaattttaaaaatt

SEQ ID NO: 466 - DNA, 1627 bp, Homo sapiens
ggggacccgggccgcgtgggcgccgggatggagggcgccaaggggcggggagcgggcgtgcgtgtgtgtgcgagtgcgaatgcgagggaggccggccttgagtgaaaccggagctacaaagaaggggagagtccgggagcgggagggcgcgagggaggagcggcggctccggggcagctccgacgccctcccgcggggaaggagcccccgcggtgccgccgaggccccgacgcggggccgcccctcggctcgccgccccgcgcccgcgcccgctgggaatgatgaagaagaacaattccgccaagcggggacctcaggatggaaaccagcagcctgcaccgcccgagaaggtcggctgggtccggaaattctgcgggaaagggattttcagggagatttggaaaaaccgctatgtggtgctgaaaggggaccagctctacatctctgagaaggaggtaaaagatgagaaaaatattcaagaggtatttgacctgagtgactatgagaagtgtgaagagctccggaagtccaagagcaggagcaagaaaaatcatagcaagtttactcttgcccactccaaacagcccggtaacacggcacccaacctgatcttcctggcagtgagtccagaagagaaggaatcgtggatcaatgccctcaactctgccatcacccgagccaagaaccgtatcttggatgaggtcaccgttgaggaggacagctatcttgcccatcccactcgagacagggcaaaaatccagcactcccgccgccccccaacaaggggacacctaatggctgtggcttccacctctacctcggatgggatgctgaccttggacttgatccaagaggaagacccttcccctgaggaaccaacctcttgtgctgagagctttcgggttgacctggacaagtctgtggcccagctggcagggagccggcggagagcggactcagaccgcatccagccctccgcagaccgggcaagcagtctctcccgaccttgggaaaaaacagacaaaggggccacctacaccccccaggcacccaagaagttgacgcccacagagaaaggccgctgcgcctccctggaggagatcctatctcagcgggatgctgcctctgcccgcaccctccagctgcgggctgaggaacccccaacccctgccctccccaacccggggcagctgtcccggatccaggacctggtagcaaggaaactggaggagactcaggagcttctggcagaggttcagggactgggagatgggaagcgaaaggccaaggacccccctcggtctccgccggattctgagtcagagcagctgctgctggagacggaacggctgctgggagaggcatcatcgaattggagccaggcaaagagggtgctgcaggaggtcagggagctgagagacctgtacagacagatggacctgcagaccccggactcccacctcagacagaccaccccgcacagtcagtaccggaagagcctgatgtgagggcagggtggggtctggaacttgtcgggttggacagactcttatctccgtgttgctggataaagcttttttatttacctcaatcaaaaaaagaaaacaaaaatgaaaaaaaaaaaaaa

SEQ ID NO: 467 - DNA, 2922 bp, Homo sapiens
agcctgggctctgtgagactgaggtggcggtcagccggagtgagtgttggggtcctggggcacctgccttacatggcttgtttatgaacattaaagggaagaagttgaagcttgaggagcgaggatggcagtcaacaaaggcctcaccttgctggatggagacctccctgagcaggagaatgtgctgcagcgggtcctgcagctgccggtggtgagtggcacctgcgaatgcttccagaagacctacaccagcactaaggaagcccaccccctggtggcctctgtgtgcaatgcctatgagaagggcgtgcagagcgccagtagcttggctgcctggagcatggagccggtggtccgcaggctgtccacccagttcacagctgccaatgagctggcctgccgaggcttggaccacctggaggaaaagatccccgccctccagtacccccctgaaaagattgcttctgagctgaaggacaccatctccacccgcctccgcagtgccagaaacagcatcagcgttcccatcgcgagcacttcagacaaggtcctgggggccgctttggccgggtgcgagcttgcctggggggtggccagagacactgcggaatttgctgccaacactcgagctggccgactggcttctggaggggccgacttggccttgggcagcattgagaaggtggtggagtacctcctccctgcagacaaggaagagtcagcccctgctcctggacaccagcaagcccagaagtctcccaaggccaagccaagcctcttgagcagggttggggctctgaccaacaccctctctcgatacaccgtgcagaccatggcccgggccctggagcagggccacaccgtggccatgtggatcccaggcgtggtgcccctgagcagcctggcccagtggggtgcctcagtggccatgcaggcggtgtcccggcggaggagcgaagtgcgggtaccctggctgcacagcctcgcagccgcccaggaggaggatcatgaggaccagacagacacggagggagaggacacggaggaggaggaagaattggagactgaggagaacaagttcagtgaggtagcagccctgccaggccctcgaggcctcctgggtggtgtggcacataccctgcagaagaccctccagaccaccatctcggctgtgacatgggcacctgcagctgtgctgggcatggcagggagggtgctgcacctcacaccagcccctgctgtctcctcaaccaaggggagggccatgtccctatcagatgccctgaagggcgttactgacaacgtggtggacacagtggtgcattacgtgccgctccccaggctgtcgctgatggagcccgagagcgaattccgggacatcgacaacccaccagccgaggtcgagcgccgggaggcggagcgcagagcgtctggggcgccgtccgccggcccggagcccgccccgcgtctcgcacagccccgccgcagcctgcgcagcgcgcagagccccggcgcgccccccggcccgggcctggaggacgaagtcgccacgcccgcagcgccgcgcccgggcttcccggccgtgccccgcgagaagccaaagcgcagggtcagcgacagcttcttccggcccagcgtcatggagcccatcctgggccgcacgcattacagccagctgcgcaagaagagctgagtcgccgcaccagccgccgcgccccgggccggcgggtttctctaacaaataaacagaacccgcactgcccaggcgagcgttgccactttcaaagtggtcccctggggagctcagcctcatcctgatgatgctgccaaggcgcactttttatttttattttatttttattttttttttagcatccttttggggcttcactctcagagccagtttttaagggacaccagagccgcagcctgctctgattctatggcttggttgttactataagagtaattgcctaacttgatttttcatctctttaaccaaacttgtggccaaaagatatttgaccgtttccaaaattcagattctgcctctgcggataaatatttgccacgaatgagtaactcctgtcaccactctgaaggtccagacagaaggttttgacacattcttagcactgaactcctctgtgatctaggatgatctgttccccctctgatgaacatcctctgatgatctaggctcccagcaggctactttgaagggaacaatcagatgcaaaagctcttgggtgtttatttaaaatactagtgtcactttctgagtacccgccgcttcacaggctgagtccaggcctgtgtgctttgtagagccagctgcttgctcacagccacatttccatttgcatcattactgccttcacctgcatagtcactcttttgatgctggggaaccaaaatggtgatgatatatagactttatgtatagccacagttcatccccaaccctagtcttcgaaatgttaatatttgataaatctagaaaatgcattcatacaattacagaattcaaatattgcaaaaggatgtgtgtctttctccccgagctcccctgttccccttcattgaaaaccaccacggtgccatctcttgtgtatgcagggctatgcacctgcaggcacgtgtgtatgcactccccgcttgtgtttacacaagctgtggggtgttacgcatgcctgcttttttcacttaataatacagcttggagagatttttgtatcacattataaatcccactcgctctttttgatggccacataataactactgcataatatggatacgccttatttgatttaactagttccctaatgatggacttttaagttgtttcctttttttttcttttttgctactgcaaacgatgctataataaatgtccttatcaaaaaaaaaaaaaaaaaa

SEQ ID NO: 468 - DNA, 3089 bp, Homo sapiens
aaagattccgaggtgcagaagttgtctgagtgcgttggtcggcggcagtcgggccagacccaggactctgcgactttacatctttaaatggatgagatggctaccactcagatttccaaagatgagcttgatgaactcaaagaggcctttgcaaaagttgatctcaacagcaacggattcatttgtgactatgaacttcatgagctcttcaaggaagctaatatgccattaccaggatataaagtgagagaaattattcagaaactcatgctggatggtgacaggaataaagatgggaaaataagttttgacgaatttgtttatatttttcaagaggtaaaaagtagtgatattgccaagaccttccgcaaagcaatcaacaggaaagaaggtatttgtgctctgggtggaacttcagagttgtccagcgaaggaacacagcattcttactcagaggaagaaaaatatgcttttgttaactggataaacaaagctttggaaaatgatcctgattgtagacatgttataccaatgaaccctaacaccgatgacctgttcaaagctgttggtgatggaattgtgctttgtaaaatgattaacctttcagttcctgataccattgatgaaagagcaatcaacaagaagaaacttacacccttcatcattcaggaaaacttgaacttggcactgaactctgcttctgccattgggtgtcatgttgtgaacattggtgcagaagatttgagggctgggaaacctcatctggttttgggactgctttggcagatcattaagatcggtttgttcgctgacattgaattaagcaggaatgaagccttggctgctttactccgagatggtgagactttggaggaacttatgaaattgtctccagaagagcttctgcttagatgggcaaactttcatttggaaaactcgggctggcaaaaaattaacaactttagtgctgacatcaaggattccaaagcctatttccatcttctcaatcaaatcgcaccaaaaggacaaaaggaaggtgaaccacggatagatattaacatgtcaggtttcaatgaaacagatgatttgaagagagctgagagtatgcttcaacaagcagataaattaggttgcagacagtttgttacccctgctgatgttgtcagtggaaaccccaaactcaacttagctttcgtggctaacctgtttaataaatacccagcactaactaagccagagaaccaggatattgactggactctattagaaggagaaactcgtgaagaaagaaccttccgtaactggatgaactctcttggtgtcaatcctcacgtaaaccatctctatgctgacctgcaagatgccctggtaatcttacagttatatgaacgaattaaagttcctgttgactggagtaaggttaataaacctccatacccgaaactgggagccaacatgaaaaagctagaaaactgcaactatgctgttgaattagggaagcatcctgctaaattctccctggttggcattggagggcaagacctgaatgatgggaaccaaaccctgactttagctttagtctggcagctgatgagaagatataccctcaatgtcctggaagatcttggagatggtcagaaagccaatgacgacatcattgtgaactgggtgaacagaacgttgagtgaagctggaaaatcaacttccattcagagttttaaggacaagacgatcagctccagtttggcagttgtggatttaattgatgccatccagccaggctgtataaactatgaccttgtgaagagtggcaatctaacagaagatgacaagcacaataatgccaagtatgcagtgtcaatggctagaagaatcggagccagagtgtatgctctccctgaagaccttgtggaagtaaagcccaagatggtcatgactgtgtttgcatgtttgatgggcaggggaatgaagagagtgtaaaataaccaatctgaataaaacagccatgctcccaggtgcatgattcgcaggtcagctatttccaggtgaagtgcttatggcttaaggaactcttggccattcaaaggacttttcattttgattaacaggactagcttatcatgagagccctcaggggaaagggtttaagaaaaacaactcctctttcccatagtcagagttgaatttgtcaggcacgcctgaaatgtgctcatagccaaaacattttactctctcctcctagaatgctgcccttgacatttcccattgctgtatgttatttcttgctctgttatcttttgccctcttagaatgtccctctcttgggacttgcttagatgatgggatatgaatattattagacagtaattttgctttccatccagtatgctagttcttattcgagaactatggtcagagcgtatttggatatgagtatcctttgcttatctttgtagtactgaaaatttgccgaagtaactggctgtgcagaatgtaatagaagcttttcttattcttttattcttaagatcagtatctttttacagtattctttctacatgatccttttttgtacatttaagaatattttgattatattaaacaagactgctgattttgctactttttttaaggggtcttcaagtaagtaaaacatacatcgtagctagaagaaaaatgtaccttaaatttgcatcttccctctcatacccaagctgtaaacaattgaaatattttgtcttaaatcacttggttcaatacatgcttatttgttttaaaacctgtatcatcaaactctctctctaaatttaaaatgctgttgaatatgatacttttgaggagagagtgtgctcagaacttagacgggatttggtaggccaagtatgctaagtgtacaatatattttttaattttacacctgaaacaaagaaatgtggtcactaaaaataaaagtatatatgtaggaattaatgtactcttgctttgtcaagctgtttgctatagtttccaaggtattatgttactctaactctgaaaagtgatgtaatctggtagcaatgtagtagttcaaataaaggcatttacataat

SEQ ID NO: 469 - DNA, 740 bp, Homo sapiens
ggaccccagacatgaggaggctcctcctggtcaccagcctggtggttgtgctgctgtgggaggcaggtgcagtcccagcacccaaggtccctatcaagatgcaagtcaaacactggccctcagagcaggacccagagaaggcctggggcgcccgtgtggtggagcctccggagaaggacgaccagctggtggtgctgttccctgtccagaagccgaaactcttgaccaccgaggagaagccacgaggtcagggcaggggccccatccttccaggcaccaaggcctggatggagaccgaggacaccctgggccgtgtcctgagtcccgagcccgaccatgacagcctgtaccaccctccgcctgaggaggaccagggcgaggagaggccccggttgtgggtgatgccaaatcaccaggtgctcctgggaccggaggaagaccaagaccacatctaccacccccagtagggctccaggggccatcactgcccccgccctgtcccaaggcccaggctgttgggactgggaccctccctaccctgccccagctagacaaataaaccccagcaggccgggcgcggtggctcacctctgtaatcccagcacttttagaggccgaggcaggcggatcacctgaaatcaggagttccagaccagcctgggcaacatggtgaaaccccgtctctactaaaaatacaaaaattagccgggaaaaaaaaaaaaaaaaaaaaaaaaaaaaaa

SEQ ID NO: 470 - DNA, 4675 bp, Homo sapiens
cagtagcatcgcccatttgccattcactgcagtagcaaaagtagtactctgtggtgggttaatcggtttgaggcagctccttaaatgaacatttgtgtttcatttttctgttattttcccgaacatgaaaagacgataaaactgaaatggaaaagatctattccagaggggagcttcaccacttcattgacggctttaatgaagagaaaagcaactggatgcgctatgtgaatccagcacactctccccgggagcaaaacctggctgcgtgtcagaacgggatgaacatctacttctacaccattaagcccatccctgccaaccaggaacttcttgtgtggtattgtcgggactttgcagaaaggcttcactacccttatcccggagagctgacaatgatgaatctcacacaaacacagagcagtctaaagcaaccgagcactgagaaaaatgaactctgcccaaagaatgtcccaaagagagagtacagcgtgaaagaaatcctaaaattggactccaacccctccaaaggaaaggacctctaccgttctaacatttcacccctcacatcagaaaaggacctcgatgactttagaagacgtgggagccccgaaatgcccttctaccctcgggtcgtttaccccatccgggcccctctgccagaagactttttgaaagcttccctggcctacgggatcgagagacccacgtacatcactcgctcccccattccatcctccaccactccaagcccctctgcaagaagcagccccgaccaaagcctcaagagctccagccctcacagcagccctgggaatacggtgtcccctgtgggccccggctctcaagagcaccgggactcctacgcttacttgaacgcgtcctacggcacggaaggtttgggctcctaccctggctacgcacccctgccccacctcccgccagctttcatcccctcgtacaacgctcactaccccaagttcctcttgcccccctacggcatgaattgtaatggcctgagcgctgtgagcagcatgaatggcatcaacaactttggcctcttcccgaggctgtgccctgtctacagcaatctcctcggtgggggcagcctgccccaccccatgctcaaccccacttctctcccgagctcgctgccctcagatggagcccggaggttgctccagccggagcatcccagggaggtgcttgtcccggcgccccacagtgccttctcctttaccggggccgccgccagcatgaaggacaaggcctgtagccccacaagcgggtctcccacggcgggaacagccgccacggcagaacatgtggtgcagcccaaagctacctcagcagcgatggcagcccccagcagcgacgaagccatgaatctcattaaaaacaaaagaaacatgaccggctacaagacccttccctacccgctgaagaagcagaacggcaagatcaagtacgaatgcaacgtttgcgccaagactttcggccagctctccaatctgaaggtccacctgagagtgcacagtggagaacggcctttcaaatgtcagacttgcaacaagggctttactcagctcgcccacctgcagaaacactacctggtacacacgggagaaaagccacatgaatgccaggtctgccacaagagatttagcagcaccagcaatctcaagacccacctgcgactccattctggagagaaaccataccaatgcaaggtgtgccctgccaagttcacccagtttgtgcacctgaaactgcacaagcgtctgcacacccgggagcggccccacaagtgctcccagtgccacaagaactacatccatctctgtagcctcaaggttcacctgaaagggaactgcgctgcggccccggcgcctgggctgcccttggaagatctgacccgaatcaatgaagaaatcgagaagtttgacatcagtgacaatgctgaccggctcgaggacgtggaggatgacatcagtgtgatctctgtagtggagaaggaaattctggccgtggtcagaaaagagaaagaagaaactggcctgaaagtgtctttgcaaagaaacatggggaatggactcctctcctcagggtgcagcctttatgagtcatcagatctacccctcatgaagttgcctcccagcaacccactacctctggtacctgtaaaggtcaaacaagaaacagttgaaccaatggatccttaagattttcagaaaacacttattttgtttcttaagttatgacttggtgagtcagggtgcctgtaggaagtggcttgtacataatcccagctctgcaaagctctctcgacagcaaatggtttcccctcacctctggaattaaagaaggaactccaaagttactgaaatctcagggcatgaacaaggcaaaggccatatatatatatatatatatatctgtatacatattatatatacttatttacacctgtgtctatatatttgcccctgtgtattttgaatatttgtgtggacatgtttgcatagccttcccattactaagactattacctagtcataattattttttcaatgataatccttcataatttattatacaatttatcattcagaaagcaataattaaaaaagtttacaatgactggaaagattccttgtaatttgagtataaatgtatttttgtcttgtggccattctttgtagataatttctgcacatctgtataagtacctaagatttagttaaacaaatatatgacttcagtcaacctctctctctaataatggtttgaaaatgaggtttgggtaattgccaatgttggacagttgatgtgttcattcctgggatcctatcatttgaacagcattgtacataacttgggggtatgtgtgcaggattacccaagaataacttaagtagaagaaacaagaaagggaatcttgtatatttttgttgatagttcatgtttttcccccagccacaattttaccggaagggtgacaggaaggctttaccaacctgtctctccctccaaaagagcagaatcctcccaccgccctgccctccccaccgagtcctgtggccattcagagcggccacatgacttttgcatccattgtattatcagaaaatgtgaagaagaaaaaaatgccatgttttaaaaccactgcgaaaatttccccaaagcataggtggctttgtgtgtgtgcgatttgggggcttgagtctgggtggtgttttgttgttggtttttgttgctttttttttttttttttttttaatgtcaaaattgcacaaacatggtgctctaccaggaaggattcgaggtagataggctcaggccacactttaaaaacaaacacacaaacaacaaaaaacgggtattctagtcatcttggggtaaaagcgggtaatgaacattcctatccccaacacatcaattgtattttttctgtaaaactcagattttcctcagtatttgtgtttttacattttatggttaatttaatggaagatgaaagggcattgcaaagttgttcaacaacagttacctcattgagtgtgtccagtagtgcaggaaatgatgtcttatctaatgatttgcttctctagaggagaaaccgagtaaatgtgctccagcaagatagactttgtgttattctatcttttattctgctaagcccaaagattacatgttggtgttcaaagtgtagcaaaaaatgatgtatatttataaatctatttataccactatatcatatgtatatatatttataaccacttaaattgtgagccaagccatgtaaaagatctactttttctaagggcaaaaaaaaaaaaaaaaaaaaaagaacactcctttctgagactttgcttaatacttggtgacctcacaatcacgtcggtatgattgggcacccttgcctactgtaagagaccctaaaaccttggtgcagtggtggggaccacaaaacaaccagggaggaagagatacatcattttttagtattaaggaccatctaagacagctctattttttttttgccactttatgattatgtggtcacacccaagtcacagaaataaaaaactgactttaccgctgcaatttttctgttttcctccttactaaatactgatacattactccaatctattttataattatatttgacattttgttcacatcaactaatgttcacctgtagaagagaacaaatttcgaataatccagggaaacccaagagccttactggtcttctgtaacttccaagactgacagctttttatgtatcagtgtttgataaacacagtccttaactgaaggtaaaccaaagcatcacgttgacattagaccaaatacttttgattcccaactactcgtttgttctttttctccttttgtgctttcccatagtgagaatttttataaagacttcttgcttctctcaccatccatccttctcttttctgcctcttacatgtgaatgttgagcccacaatcaacagtggttttattttttcctctactcaaagttaaaactgaccaaagttactggctttttactttgctagaacaacaaactatcttatgtttacatactggtttacaatgttatttatgtgcaaattgtcaaaatgtaaattaaatataaatgttcatgctttaccaaaaa

SEQ ID NO: 471 - DNA, 5165 bp, Homo sapiens
gggaagccagacggttaacacagacaaagtgctgccgtgacactcggccctccagtgttgcggagaggcaagagcagcgaccgcggcacctgtccgcccggagctgggacgcgggcgcccgggcggccggacgaagcgaggagggaccgccgaggtgcgcgtctgtgcggctcagcctggcgggggacgcggggagaatgtggactgggtagagatgaacgagacttttctcagatgttggatatttgcttggaaaaacgtgtgggtacgaccttggctgcccccaagtgtaactccagcactgtgaggtttcagggattggcagaggggaccaaggggaccatgaaaatggacatggaggatgcggatatgactctgtggacagaggctgagtttgaagagaagtgtacatacattgtgaacgaccacccctgggattctggtgctgatggcggtacttcggttcaggcggaggcatccttaccaaggaatctgcttttcaagtatgccaccaacagtgaagaggttattggagtgatgagtaaagaatacataccaaagggcacacgttttggacccctaataggtgaaatctacaccaatgacacagttcctaagaacgccaacaggaaatatttttggaggatctattccagaggggagcttcaccacttcattgacggctttaatgaagagaaaagcaactggatgcgctatgtgaatccagcacactctccccgggagcaaaacctggctgcgtgtcagaacgggatgaacatctacttctacaccattaagcccatccctgccaaccaggaacttcttgtgtggtattgtcgggactttgcagaaaggcttcactacccttatcccggagagctgacaatgatgaatctcacacaaacacagagcagtctaaagcaaccgagcactgagaaaaatgaactctgcccaaagaatgtcccaaagagagagtacagcgtgaaagaaatcctaaaattggactccaacccctccaaaggaaaggacctctaccgttctaacatttcacccctcacatcagaaaaggacctcgatgactttagaagacgtgggagccccgaaatgcccttctaccctcgggtcgtttaccccatccgggcccctctgccagaagactttttgaaagcttccctggcctacgggatcgagagacccacgtacatcactcgctcccccattccatcctccaccactccaagcccctctgcaagaagcagccccgaccaaagcctcaagagctccagccctcacagcagccctgggaatacggtgtcccctgtgggccccggctctcaagagcaccgggactcctacgcttacttgaacgcgtcctacggcacggaaggtttgggctcctaccctggctacgcacccctgccccacctcccgccagctttcatcccctcgtacaacgctcactaccccaagttcctcttgcccccctacggcatgaattgtaatggcctgagcgctgtgagcagcatgaatggcatcaacaactttggcctcttcccgaggctgtgccctgtctacagcaatctcctcggtgggggcagcctgccccaccccatgctcaaccccacttctctcccgagctcgctgccctcagatggagcccggaggttgctccagccggagcatcccagggaggtgcttgtcccggcgccccacagtgccttctcctttaccggggccgccgccagcatgaaggacaaggcctgtagccccacaagcgggtctcccacggcgggaacagccgccacggcagaacatgtggtgcagcccaaagctacctcagcagcgatggcagcccccagcagcgacgaagccatgaatctcattaaaaacaaaagaaacatgaccggctacaagacccttccctacccgctgaagaagcagaacggcaagatcaagtacgaatgcaacgtttgcgccaagactttcggccagctctccaatctgaaggtccacctgagagtgcacagtggagaacggcctttcaaatgtcagacttgcaacaagggctttactcagctcgcccacctgcagaaacactacctggtacacacgggagaaaagccacatgaatgccaggtctgccacaagagatttagcagcaccagcaatctcaagacccacctgcgactccattctggagagaaaccataccaatgcaaggtgtgccctgccaagttcacccagtttgtgcacctgaaactgcacaagcgtctgcacacccgggagcggccccacaagtgctcccagtgccacaagaactacatccatctctgtagcctcaaggttcacctgaaagggaactgcgctgcggccccggcgcctgggctgcccttggaagatctgacccgaatcaatgaagaaatcgagaagtttgacatcagtgacaatgctgaccggctcgaggacgtggaggatgacatcagtgtgatctctgtagtggagaaggaaattctggccgtggtcagaaaagagaaagaagaaactggcctgaaagtgtctttgcaaagaaacatggggaatggactcctctcctcagggtgcagcctttatgagtcatcagatctacccctcatgaagttgcctcccagcaacccactacctctggtacctgtaaaggtcaaacaagaaacagttgaaccaatggatccttaagattttcagaaaacacttattttgtttcttaagttatgacttggtgagtcagggtgcctgtaggaagtggcttgtacataatcccagctctgcaaagctctctcgacagcaaatggtttcccctcacctctggaattaaagaaggaactccaaagttactgaaatctcagggcatgaacaaggcaaaggccatatatatatatatatatatatctgtatacatattatatatacttatttacacctgtgtctatatatttgcccctgtgtattttgaatatttgtgtggacatgtttgcatagccttcccattactaagactattacctagtcataattattttttcaatgataatccttcataatttattatacaatttatcattcagaaagcaataattaaaaaagtttacaatgactggaaagattccttgtaatttgagtataaatgtatttttgtcttgtggccattctttgtagataatttctgcacatctgtataagtacctaagatttagttaaacaaatatatgacttcagtcaacctctctctctaataatggtttgaaaatgaggtttgggtaattgccaatgttggacagttgatgtgttcattcctgggatcctatcatttgaacagcattgtacataacttgggggtatgtgtgcaggattacccaagaataacttaagtagaagaaacaagaaagggaatcttgtatatttttgttgatagttcatgtttttcccccagccacaattttaccggaagggtgacaggaaggctttaccaacctgtctctccctccaaaagagcagaatcctcccaccgccctgccctccccaccgagtcctgtggccattcagagcggccacatgacttttgcatccattgtattatcagaaaatgtgaagaagaaaaaaatgccatgttttaaaaccactgcgaaaatttccccaaagcataggtggctttgtgtgtgtgcgatttgggggcttgagtctgggtggtgttttgttgttggtttttgttgctttttttttttttttttttttaatgtcaaaattgcacaaacatggtgctctaccaggaaggattcgaggtagataggctcaggccacactttaaaaacaaacacacaaacaacaaaaaacgggtattctagtcatcttggggtaaaagcgggtaatgaacattcctatccccaacacatcaattgtattttttctgtaaaactcagattttcctcagtatttgtgtttttacattttatggttaatttaatggaagatgaaagggcattgcaaagttgttcaacaacagttacctcattgagtgtgtccagtagtgcaggaaatgatgtcttatctaatgatttgcttctctagaggagaaaccgagtaaatgtgctccagcaagatagactttgtgttattctatcttttattctgctaagcccaaagattacatgttggtgttcaaagtgtagcaaaaaatgatgtatatttataaatctatttataccactatatcatatgtatatatatttataaccacttaaattgtgagccaagccatgtaaaagatctactttttctaagggcaaaaaaaaaaaaaaaaaaaaaagaacactcctttctgagactttgcttaatacttggtgacctcacaatcacgtcggtatgattgggcacccttgcctactgtaagagaccctaaaaccttggtgcagtggtggggaccacaaaacaaccagggaggaagagatacatcattttttagtattaaggaccatctaagacagctctattttttttttgccactttatgattatgtggtcacacccaagtcacagaaataaaaaactgactttaccgctgcaatttttctgttttcctccttactaaatactgatacattactccaatctattttataattatatttgacattttgttcacatcaactaatgttcacctgtagaagagaacaaatttcgaataatccagggaaacccaagagccttactggtcttctgtaacttccaagactgacagctttttatgtatcagtgtttgataaacacagtccttaactgaaggtaaaccaaagcatcacgttgacattagaccaaatacttttgattcccaactactcgtttgttctttttctccttttgtgctttcccatagtgagaatttttataaagacttcttgcttctctcaccatccatccttctcttttctgcctcttacatgtgaatgttgagcccacaatcaacagtggttttattttttcctctactcaaagttaaaactgaccaaagttactggctttttactttgctagaacaacaaactatcttatgtttacatactggtttacaatgttatttatgtgcaaattgtcaaaatgtaaattaaatataaatgttcatgctttaccaaaaa

SEQ ID NO: 472 - DNA, 921 bp, Homo sapiens
gcggcgctcgcgccaagggacgtgtttctgcgctcgcgtggtcatggaggcgctgccgctgctagccgcgacaactccggaccacggccgccaccgaaggctgcttctgctgccgctactgctgttcctgctgccggctggagctgtgcagggctgggagacagaggagaggccccggactcgcgaagaggagtgccacttctacgcgggtggacaagtgtacccgggagaggcatcccgggtatcggtcgccgaccactccctgcacctaagcaaagcgaagatttccaagccagcgccctactgggaaggaacagctgtgatcgatggagaatttaaggagctgaagttaactgattatcgtgggaaatacttggttttcttcttctacccacttgatttcacatttgtgtgtccaactgaaattatcgcttttggcgacagacttgaagaattcagatctataaatactgaagtggtagcatgctctgttgattcacagtttacccatttggcctggattaatacccctcgaagacaaggaggacttgggccaataaggattccacttctttcagatttgacccatcagatctcaaaggactatggtgtatacctagaggactcaggccacactcttagaggtctcttcattattgatgacaaaggaatcctaagacaaattactctgaatgatcttcctgtgggtagatcagtggatgagacactacgtttggttcaagcattccagtacactgacaaacacggagaagtctgccctgctggctggaaacctggtagtgaaacaataatcccagatccagctggaaagctgaagtatttcgataaactgaattgagaaatacttcttcaagttatgatgcttgaaagttctcaataaagttcacggtttcattacca

SEQ ID NO: 473 - DNA, 3678 bp, Homo sapiens
gacgcgcgccgggagccgcgggccgggccagccgggccgccggggcccagtgcgccgcgctcgcagccggtagcgcgccagcgccgtaggcgctcgctcggcagccgcggggccctaggccgtgccggggagggggcgagggcggcgcccaggcgcctgccgccccggaggcaggatgagcatcgagatcccggcgggactgacggagctgctgcagggcttcacggtggaggtgctgaggcaccagcccgcggacctgctggagttcgcgctgcagcacttcacccgcctgcagcaggagaacgagcgcaaaggcaccgcgcgcttcggccatgagggcaggacctggggggacctgggcgccgctgccgggggcggcacccccagcaagggggtcaacttcgccgaggagcccatgcagtccgactccgaggacggggaggaggaggaggcggcgcccgcggacgcaggggcgttcaatgctccagtaataaaccgattcacaaggcgtgcctcagtatgtgcagaagcttataatcctgatgaagaagaagatgatgcagagtccaggattatacatccaaaaactgatgatcaaagaaataggttgcaagaggcttgcaaagacatcctgctgtttaagaatctggatccggagcagatgtctcaagtattagatgccatgtttgaaaaattggtcaaagatggggagcatgtaattgatcaaggtgacgatggtgacaacttttatgtaattgatagaggcacatttgatatttatgtgaaatgtgatggtgttggaagatgtgttggtaactatgataatcgtgggagtttcggcgaactggccttaatgtacaatacacccagagcagctacaatcactgctacctctcctggtgctctgtggggtttggacagggtaaccttcaggagaataattgtgaaaaacaatgccaaaaagagaaaaatgtatgaaagctttattgagtcactgccattccttaaatctttggagttttctgaacgcctgaaagtagtagatgtgataggcaccaaagtatacaacgatggagaacaaatcattgctcagggagattcggctgattcttttttcattgtagaatctggagaagtgaaaattactatgaaaagaaagggtaaatcagaagtggaagagaatggtgcagtagaaatcgctcgatgctcgcggggacagtactttggagagcttgccctggtaactaacaaacctcgagcagcttctgcccacgccattgggactgtcaaatgtttagcaatggatgtgcaagcatttgaaaggcttctgggaccttgcatggaaattatgaaaaggaacatcgctacctatgaagaacagttagttgccctgtttggaacgaacatggatattgttgaacccactgcatgaagcaaaagtatggagcaagacctgtagtgacaaaattacacagtagtggttagtccactgagaatgtgtttgtgtagatgccaagcattttctgtgatttcaggttttttcctttttttacatttacaacgtatcaataaacagtagtgatttaatagtcaataggctttaacatcactttctaaagagtagttcataaaaaaatcaacatactgataaaatgactttgtactccacaaaattatgactgaaaggtttattaaaatgattgtaatatatagaaagtatctgtgtttaagaagataattaaaggatgttatcataggctatatgtgttttacttattcagactgataatcatattagtgactatccccatgtaagagggcacttggcaattaaacatgctacacagcatggcatcacttttttttataactcattaaacacagtaaaattttaatcatttttgttttaaagttttctagcttgataagttatgtgctggccttggcctattggtgaaatggtataaaatatcatatgcagttttaaaactttttatatttttgcaataaagtacattttgactttgttggcataatgtcagtaacatacatattccagtggttttatggacaggcaatttagtcattatgataataaggaaaacagtgttttagatgagagatcattaatgcatttttccctcatcaagcatatatctgcttttttttattttgcaattctctgtattctatgtctttaaaaatttgatcttgacatttaatgtcacaaagttttgtttttttaaaaagtgatttaaacttaagatccgacattttttgtattctttaagattttacacctaaaaaatctctcctatcccaaaaataatgtgggatccttatcagcatgcccacagtttatttctttgttcttcactaggcctgcataatacagtcctatgtagacatctgttcccttgggtttccgttctttcttaggatggttgccaacccacaatctcattgatcagcagccaatatgggtttgtttggtttttttaattcttaaaaacatcctctagaggaatagaaacaaatttttatgagcataaccctatataaagacaaaatgaatttctgaccttaccatatataccattaggccttgccattgctttaatgtagactcatagttgaaattagtgcagaaagaactcagatgtactagattttcattgttcattgatatgctcagtatgctgccacataagatgaatttaattatattcaaccaaagcaatatactcttacatgatttctaggccccatgacccagtgtctagagacattaattctaaccagttgtttgcttttaaatgagtgatttcattttgggaaacaggtttcaaatgaatatatatacatgggtaaaattactctgtgctagtgtagtcttactagagaatgtttatggtcccacttgtatatgaaaatgtggttagaatgttaattggataatgtatatataagaagttaaagtatgtaaagtataacttcagccacatttttagaacactgtttaacatttttgcaaaaccttcttgtaggaaaagagagctctctacatgaagatgacttgttttatatttcagattttattttaaaagccatgtctgttaaacaagaaaaaacacaaaagaactccagattcctggttcatcattctgtattcttactcactttttcaagttatctattttgttgcataaactaattgttaactattcatggaacagcaaacgcctgtttaataaagaactttgaccaaggctataaatgccacgtacattattttcagtattgttggttatatttaaattttccttacaataaagcacacttttataataaaatacatgaattattgtttttcatacttttttgcttgtttctttaaagttttctgacgtgcataatgcataattcattgaaaagcatgatagcaatgtggcatgtggaagcgaacccccagggcataacatagtaagaaagtatggttctgtatggcaataggtttttaaaattattagctattcatcatgtgtgggagaaataattgtggtgtgttgcagatttatttggccatttagaataaccaaatcaatctggctaactaggaatttatgtgtaaaattatctgattaaaacagctcaagtttgaaaaaaaaaaaaaaaaaa

SEQ ID NO: 474 - DNA, 3679 bp, Homo sapiens
ccctcccctcccgatcctcatccccttgccctcccccagcccagggacttttccggaaagtttttattttccgtctgggctctcggagaaagaagctcctggctcagcggctgcaaaactttcctgctgccgcgccgccagcccccgccctccgctgcccggccctgcgccccgccgagcgatgagcgcccctccggtcctgcggccgcccagtccgctgctgcccgtggcggcggcagctgccgcagcggccgccgcactggtcccagggtccgggcccgggcccgcgccgttcttggctcctgtcgcggccccggtcgggggcatctcgttccatctgcagatcggcctgagccgtgagccggtgctgctgctgcaggactcgtccggggactacagcctggcgcacgtccgcgagatggcttgctccattgtcgaccagaagttccctgaatgtggtttctacggaatgtatgataagatcctgctttttcgccatgaccctacctctgaaaacatccttcagctggtgaaagcggccagtgatatccaggaaggcgatcttattgaagtggtcttgtcagcttccgccacctttgaagactttcagattcgtccccacgctctctttgttcattcatacagagctccagctttctgtgatcactgtggagaaatgctgtgggggctggtacgtcaaggtcttaaatgtgaagggtgtggtctgaattaccataagagatgtgcatttaaaatacccaacaattgcagcggtgtgaggcggagaaggctctcaaacgtttccctcactggggtcagcaccatccgcacatcatctgctgaactctctacaagtgcccctgatgagccccttctgcaaaaatcaccatcagagtcgtttattggtcgagagaagaggtcaaattctcaatcatacattggacgaccaattcaccttgacaagattttgatgtctaaagttaaagtgccgcacacatttgtcatccactcctacacccggcccacagtgtgccagtactgcaagaagcttctgaaggggcttttcaggcagggcttgcagtgcaaagattgcagattcaactgccataaacgttgtgcaccgaaagtaccaaacaactgccttggcgaagtgaccattaatggagatttgcttagccctggggcagagtctgatgtggtcatggaagaagggagtgatgacaatgatagtgaaaggaacagtgggctcatggatgatatggaagaagcaatggtccaagatgcagagatggcaatggcagagtgccagaacgacagtggcgagatgcaagatccagacccagaccacgaggacgccaacagaaccatcagtccatcaacaagcaacaatatcccactcatgagggtagtgcagtctgtcaaacacacgaagaggaaaagcagcacagtcatgaaagaaggatggatggtccactacaccagcaaggacacgctgcggaaacggcactattggagattggatagcaaatgtattaccctctttcagaatgacacaggaagcaggtactacaaggaaattcctttatctgaaattttgtctctggaaccagtaaaaacttcagctttaattcctaatggggccaatcctcattgtttcgaaatcactacggcaaatgtagtgtattatgtgggagaaaatgtggtcaatccttccagcccatcaccaaataacagtgttctcaccagtggcgttggtgcagatgtggccaggatgtgggagatagccatccagcatgcccttatgcccgtcattcccaagggctcctccgtgggtacaggaaccaacttgcacagagatatctctgtgagtatttcagtatcaaattgccagattcaagaaaatgtggacatcagcacagtatatcagatttttcctgatgaagtactgggttctggacagtttggaattgtttatggaggaaaacatcgtaaaacaggaagagatgtagctattaaaatcattgacaaattacgatttccaacaaaacaagaaagccagcttcgtaatgaggttgcaattctacagaaccttcatcaccctggtgttgtaaatttggagtgtatgtttgagacgcctgaaagagtgtttgttgttatggaaaaactccatggagacatgctggaaatgatcttgtcaagtgaaaagggcaggttgccagagcacataacgaagtttttaattactcagatactcgtggctttgcggcaccttcattttaaaaatatcgttcactgtgacctcaaaccagaaaatgtgttgctagcctcagctgatccttttcctcaggtgaaactttgtgattttggttttgcccggatcattggagagaagtctttccggaggtcagtggtgggtacccccgcttacctggctcctgaggtcctaaggaacaagggctacaatcgctctctagacatgtggtctgttggggtcatcatctatgtaagcctaagcggcacattcccatttaatgaagatgaagacatacacgaccaaattcagaatgcagctttcatgtatccaccaaatccctggaaggaaatatctcatgaagccattgatcttatcaacaatttgctgcaagtaaaaatgagaaagcgctacagtgtggataagaccttgagccacccttggctacaggactatcagacctggttagatttgcgagagctggaatgcaaaatcggggagcgctacatcacccatgaaagtgatgacctgaggtgggagaagtatgcaggcgagcaggggctgcagtaccccacacacctgatcaatccaagtgctagccacagtgacactcctgagactgaagaaacagaaatgaaagccctcggtgagcgtgtcagcatcctctgagttccatctcctataatctgtcaaaacactgtggaactaataaatacatacggtcaggtttaacatttgccttgcagaactgccattattttctgtcagatgagaacaaagctgttaaactgttagcactgttgatgtatctgagttgccaagacaaatcaacagaagcatttgtattttgtgtgaccaactgtgttgtattaacaaaagttccctgaaacacgaaacttgttattgtgaatgattcatgttatatttaatgcattaaacctgtctccactgtgcctttgcaaatcagtgtttttcttactggagcttcattttggtaagagacagaatgtatctgtgaagtagttctgtttggtgtgtcccattggtgttgtcattgtaaacaaactcttgaagagtcgattatttccagtgttctatgaacaactccaaaacccatgtgggaaaaaaatgaatgaggagggtagggaataaaatcctaagacacaaatgcatgaacaagttttaatgtatagttttgaatcctttgcctgcctggtgtgcctcagtatatttaaactcaagacaatgcacctagctgtgcaagacctagtgctcttaagcctaaatgccttagaaatgtaaactgccatatataacagatacatttccctctttcttataatactctgttgtactatggaaaatcagctgctcagcaacctttcacctttgtgtatttttcaataataaaaaatattcttgtcaaaa

SEQ ID NO: 475 - DNA, 1483 bp, Homo sapiens
gacacagtagaaataacactttataagcctcttcctcctcccatctcctggcctccttccatcctcctctgcccagactccgcccctcccagacggtcctcacttctcttttccctagactgcagccagcggagcccgcagccggcccgagccaggaacccaggtccggagcctcaacttcaggatgttgacaacattgctgccgatactgctgctgtctggctgggccttttgtagccaagacgcctcagatggcctccaaagacttcatatgctccagatctcctacttccgcgacccctatcacgtgtggtaccagggcaacgcgtcgctggggggacacctaacgcacgtgctggaaggcccagacaccaacaccacgatcattcagctgcagcccttgcaggagcccgagagctgggcgcgcacgcagagtggcctgcagtcctacctgctccagttccacggcctcgtgcgcctggtgcaccaggagcggaccttggcctttcctctgaccatccgctgcttcctgggctgtgagctgcctcccgagggctctagagcccatgtcttcttcgaagtggctgtgaatgggagctcctttgtgagtttccggccggagagagccttgtggcaggcagacacccaggtcacctccggagtggtcaccttcaccctgcagcagctcaatgcctacaaccgcactcggtatgaactgcgggaattcctggaggacacctgtgtgcagtatgtgcagaaacatatttccgcggaaaacacgaaagggagccaaacaagccgctcctacacttcgctggtcctgggcgtcctggtgggcagtttcatcattgctggtgtggctgtaggcatcttcctgtgcacaggtggacggcgatgttaattactctccagccccctcagaaggggctggattgatggaggctggcaagggaaagtttcagctcactgtgaagccagactccccaactgaaacaccagaaggtttggagtgacagctcctttcttctcccacatctgcccactgaagatttgagggaggggagatggagaggagaggtggacaaagtacttggtttgctaagaacctaagaacgtgtatgctttgctgaattagtctgataagtgaatgtttatctatctttgtggaaaacagataatggagttggggcaggaagcctatggcccatcctccaaagacagacagaatcacctgaggcgttcaaaagatataaccaaataaacaagtcatccacaatcaaaatacaacattcaatacttccaggtgtgtcagacttgggatgggacgctgatataatagggtagaaagaagtaacacgaagaagtggtggaaatgtaaaatccaagtcatatggcagtgatcaattattaatcaattaataatattaataaatttcttatatttaaggcaaaaaaaaaataaaaaaaaaaaaaaaaaaaaaaa

SEQ ID NO: 476 - DNA, 1406 bp, Homo sapiens
gagggcgccatgaggagcctgtgctgcgccccactcctgctcctcttgctgctgccgccgctgctgctcacgccccgcgctggggacgccgccgtgatcaccggggcttgtgacaaggactcccaatgtggtggaggcatgtgctgtgctgtcagtatctgggtcaagagcataaggatttgcacacctatgggcaaactgggagacagctgccatccactgactcgtaaagttccattttttgggcggaggatgcatcacacttgcccatgtctgccaggcttggcctgtttacggacttcatttaaccgatttatttgtttagcccaaaagtaatcgctctggagtagaaaccaaatgtgaatagccacatcttacctgtaaagtcttacttgtgattgtgccaaacaaaaaatgtgccagaaagaaatgctcttgcttcctcaactttccaagtaacatttttatctttgatttgtaaatgatttttttttttttttttatcgaaagagaattttacttttggatagaaatatgaagtgtaaggcattatggaactggttcttatttccctgtttgtgttttggtttgatttggcttttttcttaaatgtcaaaaacgtacccattttcacaaaaatgaggaaaataagaatttgatattttgttagaaaaacttttttttttttttctcaccaccccaagccccatttgtgccctgccgcacaaatacacctacagcttttggtcccttgcctcttccacctcaaagaatttcaaggctcttaccttactttatttttgtccatttctcttccctcctcttgcattttaaagtggagggtttgtctctttgagtttgatggcagaatcactgatgggaatccagctttttgctggcatttaaatagtgaaaagagtgtatatgtgaacttgacactccaaactcctgtcatggcacggaagctaggagtgctgctggacccttcctaaacctgtcactcaagaggacttcagctctgctgttgggctggtgtgtggacagaaggaatggaaagccaaattaatttagtccagatttctaggtttgggtttttctaaaaataaaagattacatttacttcttttactttttataaagttttttttccttagtctcctacttagagatattctagaaaatgtcacttgaagaggaagtatttattttaatctggcacaacactaattaccatttttaaagcggtattaagttgtaatttaaaccttgtttgtaactgaaaggtcgattgtaatggattgccgtttgtacctgtatcagtattgctgtgtaaaaattctgtatcagaataataacagtactgtatatcatttgatttattttaatattatatccttatttttgtc

SEQ ID NO: 477 - DNA, 3309 bp, Homo sapiens
ctgcagggggggggggggggggggggggggggggggggcgcagcacggctcagaccgaggcgcacaggctcgcagctccgggcgcctagcgcccggtccccgccgcgacgcgccaccgtccctgccggcgcctccgcgccttcgaaatgagggtcctgggtgggcgctgcggggcgccgctggcgtgtctcctcctagtgcttcccgtctcagaggcaaaccttctgtcaaagcaacaggcttcacaagtcctggttaggaagcgtcgtgcaaattctttacttgaagaaaccaaacagggtaatcttgaaagagaatgcatcgaagaactgtgcaataaagaagaagccagggaggtctttgaaaatgacccggaaacggattatttttatccaaaatacttagtttgtcttcgctcttttcaaactgggttattcactgctgcacgtcagtcaactaatgcttatcctgacctaagaagctgtgtcaatgccattccagaccagtgtagtcctctgccatgcaatgaagatggatatatgagctgcaaagatggaaaagcttcttttacttgcacttgtaaaccaggttggcaaggagaaaagtgtgaatttgacataaatgaatgcaaagatccctcaaatataaatggaggttgcagtcaaatttgtgataatacacctggaagttaccactgttcctgtaaaaatggttttgttatgctttcaaataagaaagattgtaaagatgtggatgaatgctctttgaagccaagcatttgtggcacagctgtgtgcaagaacatcccaggagattttgaatgtgaatgccccgaaggctacagatataatctcaaatcaaagtcttgtgaagatatagatgaatgctctgagaacatgtgtgctcagctttgtgtcaattaccctggaggttacacttgctattgtgatgggaagaaaggattcaaacttgcccaagatcagaagagttgtgaggttgtttcagtgtgccttcccttgaaccttgacacaaagtatgaattactttacttggcggagcagtttgcaggggttgttttatatttaaaatttcgtttgccagaaatcagcagattttcagcagaatttgatttccggacatatgattcagaaggcgtgatactgtacgcagaatctatcgatcactcagcgtggctcctgattgcacttcgtggtggaaagattgaagttcagcttaagaatgaacatacatccaaaatcacaactggaggtgatgttattaataatggtctatggaatatggtgtctgtggaagaattagaacatagtattagcattaaaatagctaaagaagctgtgatggatataaataaacctggacccctttttaagccggaaaatggattgctggaaaccaaagtatactttgcaggattccctcggaaagtggaaagtgaactcattaaaccgattaaccctcgtctagatggatgtatacgaagctggaatttgatgaagcaaggagcttctggaataaaggaaattattcaagaaaaacaaaataagcattgcctggttactgtggagaagggctcctactatcctggttctggaattgctcaatttcacatagattataataatgtatccagtgctgagggttggcatgtaaatgtgaccttgaatattcgtccatccacgggcactggtgttatgcttgccttggtttctggtaacaacacagtgccctttgctgtgtccttggtggactccacctctgaaaaatcacaggatattctgttatctgttgaaaatactgtaatatatcggatacaggccctaagtctatgttccgatcaacaatctcatctggaatttagagtcaacagaaacaatctggagttgtcgacaccacttaaaatagaaaccatctcccatgaagaccttcaaagacaacttgccgtcttggacaaagcaatgaaagcaaaagtggccacatacctgggtggccttccagatgttccattcagtgccacaccagtgaatgccttttataatggctgcatggaagtgaatattaatggtgtacagttggatctggatgaagccatttctaaacataatgatattagagctcactcatgtccatcagtttggaaaaagacaaagaattcttaaggcatcttttctctgcttataataccttttccttgtgtgtaattatacttatgtttcaataacagctgaagggttttatttacaatgtgcagtctttgattattttgtggtcctttcctgggatttttaaaaggtcctttgtcaaggaaaaaaattctgttgtgatataaatcacagtaaagaaattcttacttctcttgctatctaagaatagtgaaaaataacaattttaaatttgaatttttttcctacaaatgacagtttcaatttttgtttgtaaaactaaattttaattttatcatcatgaactagtgtctaaatacctatgtttttttcagaaagcaaggaagtaaactcaaacaaaagtgcgtgtaattaaatactattaatcataggcagatactattttgtttatgtttttgtttttttcctgatgaaggcagaagagatggtggtctattaaatatgaattgaatggagggtcctaatgccttatttcaaaacaattcctcagggggaccagctttggcttcatctttctcttgtgtggcttcacatttaaaccagtatctttattgaattagaaaacaagtgggacatattttcctgagagcagcacaggaatcttcttcttggcagctgcagtctgtcaggatgagatatcagattaggttggataggtggggaaatctgaagtgggtacattttttaaattttgctgtgtgggtcacacaaggtctacattacaaaagacagaattcagggatggaaaggagaatgaacaaatgtgggagttcatagttttccttgaatccaacttttaattaccagagtaagttgccaaaatgtgattgttgaagtacaaaaggaactatgaaaaccagaacaaattttaacaaaaggacaaccacagagggatatagtgaatatcgtatcattgtaatcaaagaagtaaggaggtaagattgccacgtgcctgctggtactgtgatgcatttcaagtggcagttttatcacgtttgaatctaccattcatagccagatgtgtatcagatgtttcactgacagtttttaacaataaattcttttcactgtattttatatcacttataataaatcggtgtataatttt

SEQ ID NO: 478 - DNA, 2221 bp, Homo sapiens
ggccaggaacgccagccgttcacgcgttcggtcctccttggctgactcaccgccctggccgccgcaccatggacgcccccaggcaggtggtcaactttgggcctggtcccgccaagctgccgcactcagtgttgttagagatacaaaaggaattattagactacaaaggagttggcattagtgttcttgaaatgagtcacaggtcatcagattttgccaagattattaacaatacagagaatcttgtgcgggaattgctagctgttccagacaactataaggtgatttttctgcaaggaggtgggtgcggccagttcagtgctgtccccttaaacctcattggcttgaaagcaggaaggtgtgctgactatgtggtgacaggagcttggtcagctaaggccgcagaagaagccaagaagtttgggactataaatatcgttcaccctaaacttgggagttatacaaaaattccagatccaagcacctggaacctcaacccagatgcctcctacgtgtattattgcgcaaatgagacggtgcatggtgtggagtttgactttatacccgatgtcaagggagcagtactggtttgtgacatgtcctcaaacttcctgtccaagccagtggatgtttccaagtttggtgtgatttttgctggtgcccagaagaatgttggctctgctggggtcaccgtggtgattgtccgtgatgacctgctggggtttgccctccgagagtgcccctcggtcctggaatacaaggtgcaggctggaaacagctccttgtacaacacgcctccatgtttcagcatctacgtcatgggcttggttctggagtggattaaaaacaatggaggtgccgcggccatggagaagcttagctccatcaaatctcaaacaatttatgagattattgataattctcaaggattctacgtttgtccagtggagccccaaaatagaagcaagatgaatattccattccgcattggcaatgccaaaggagatgatgctttagaaaaaagatttcttgataaagctcttgaactcaatatgttgtccttgaaagggcataggtctgtgggaggcatccgggcctctctgtataatgctgtcacaattgaagacgttcagaagctggccgccttcatgaaaaaatttttggagatgcatcagctatgaacacatcctaaccaggatatactctgttcttgaacaacatacaaagtttaaagtaacttggggatggctacaaaaagttaacacagtatttttctcaaatgaacatgtttattgcagattcttcttttttgaaagaacaacagcaaaacatccacaactctgtaaagctggtgggacctaatgtcaccttaattctgacttgaactggaagcattttaagaaatcttgttgcttttctaacaaattcccgcgtattttgcctttgctgctactttttctagttagatttcaaacttgcctgtggacttaataatgcaagttgcgattaattatttctggagtcatgggaacacacagcacagagggtaggggggccctctaggtgctgaatctacacatctgtggggtctcctgggttcagcggctgttgattcaaggtcaacattgaccattggaggagtggtttaagagtgccaggcgaagggcaaactgtagatcgatctttatgctgttattacaggagaagtgacatactttatatatgtttatattagcaaggtctgtttttaataccatatactttatatttctatacatttatatttctaataatacagttatcactgatatatgtagacacttttagaatttattaaatccttgaccttgtgcattatagcattccattagcaagagttgtaccccctccccagtcttcgccttcctctttttaagctgttttatgaaaaagacctagaagttcttgattcatttttaccattctttccataggtagaagagaaagttgattggttggttgtttttcaattatgccattaaactaaacatttctgttaaattaccctatcctttgttctctactgttttctttgtaatgtatgactacgagagtgatactttgctgaaaagtctttcccctattgtttatctattgtcagtattttatgttgaatatgtaaagaacattaaagtcctaaaacatctaaaaaaaaaaaaaaaaaaaaaaaaaaaaaaaaaaa

SEQ ID NO: 479 - DNA, 2083 bp, Homo sapiens
ggccaggaacgccagccgttcacgcgttcggtcctccttggctgactcaccgccctggccgccgcaccatggacgcccccaggcaggtggtcaactttgggcctggtcccgccaagctgccgcactcagtgttgttagagatacaaaaggaattattagactacaaaggagttggcattagtgttcttgaaatgagtcacaggtcatcagattttgccaagattattaacaatacagagaatcttgtgcgggaattgctagctgttccagacaactataaggtgatttttctgcaaggaggtgggtgcggccagttcagtgctgtccccttaaacctcattggcttgaaagcaggaaggtgtgctgactatgtggtgacaggagcttggtcagctaaggccgcagaagaagccaagaagtttgggactataaatatcgttcaccctaaacttgggagttatacaaaaattccagatccaagcacctggaacctcaacccagatgcctcctacgtgtattattgcgcaaatgagacggtgcatggtgtggagtttgactttatacccgatgtcaagggagcagtactggtttgtgacatgtcctcaaacttcctgtccaagccagtggatgtttccaagtttggtgtgatttttgctggtgcccagaagaatgttggctctgctggggtcaccgtggtgattgtccgtgatgacctgctggggtttgccctccgagagtgcccctcggtcctggaatacaaggtgcaggctggaaacagctccttgtacaacacgcctccatgtttcagcatctacgtcatgggcttggttctggagtggattaaaaacaatggaggtgccgcggccatggagaagcttagctccatcaaatctcaaacaatttatgagattattgataattctcaaggattctacgtgtctgtgggaggcatccgggcctctctgtataatgctgtcacaattgaagacgttcagaagctggccgccttcatgaaaaaatttttggagatgcatcagctatgaacacatcctaaccaggatatactctgttcttgaacaacatacaaagtttaaagtaacttggggatggctacaaaaagttaacacagtatttttctcaaatgaacatgtttattgcagattcttcttttttgaaagaacaacagcaaaacatccacaactctgtaaagctggtgggacctaatgtcaccttaattctgacttgaactggaagcattttaagaaatcttgttgcttttctaacaaattcccgcgtattttgcctttgctgctactttttctagttagatttcaaacttgcctgtggacttaataatgcaagttgcgattaattatttctggagtcatgggaacacacagcacagagggtaggggggccctctaggtgctgaatctacacatctgtggggtctcctgggttcagcggctgttgattcaaggtcaacattgaccattggaggagtggtttaagagtgccaggcgaagggcaaactgtagatcgatctttatgctgttattacaggagaagtgacatactttatatatgtttatattagcaaggtctgtttttaataccatatactttatatttctatacatttatatttctaataatacagttatcactgatatatgtagacacttttagaatttattaaatccttgaccttgtgcattatagcattccattagcaagagttgtaccccctccccagtcttcgccttcctctttttaagctgttttatgaaaaagacctagaagttcttgattcatttttaccattctttccataggtagaagagaaagttgattggttggttgtttttcaattatgccattaaactaaacatttctgttaaattaccctatcctttgttctctactgttttctttgtaatgtatgactacgagagtgatactttgctgaaaagtctttcccctattgtttatctattgtcagtattttatgttgaatatgtaaagaacattaaagtcctaaaacatctaaaaaaaaaaaaaaaaaaaaaaaaaaaaaaaaaaa

SEQ ID NO: 480 - DNA, 2930 bp, Homo sapiens
ggcagtcaggcctccccgctctgtgctacctgcggcccggctctcctccgcgcccccactcgcgctgcgatgacgcgctcactgttcaagggaaacttttggagtgcagacatcctcagcaccatcggctatgacaacattatccaacatctgaacaatggccgcaagaactgcaaagagtttgaagactttctaaaagaaagggcagcaattgaagagaggtatggcaaagatctgctcaacctctctaggaagaagccgtgtggacagtctgaaatcaacaccctgaagcgggcccttgaagtcttcaagcagcaagtagacaatgtggcacaatgtcacattcagcttgcacagagtttaagagaagaggccaggaagatggaagaattcagggaaaagcaaaaactacaacgaaaaaagacagagctcataatggatgctatccataaacaaaagagcttacaattcaagaaaaccatggatgcaaagaagaactatgagcagaaatgccgggacaaagatgaggcagaacaggccgtcagccggagtgccaacctggtgaacccgaagcaacaagaaaagctttttgtgaaactggcaacttcaaagaccgcagtagaggactcagacaaagcatacatgctgcacatcggcaccctggataaggtccgagaagagtggcagagtgagcacatcaaggcctgcgaggcatttgaggctcaagaatgtgaacgaataaacttcttccggaatgcattgtggttacatgtgaatcagctgtcacaacaatgtgtcaccagtgatgaacacccatcatgtatgagaatttctactcctcccagaagaatgcagtcccagcaggaaaggctacagggcctaacttggcaaggagaggacccctcccaattcctaaaagctcaccagatgatcccaattactctttggttgatgactacagtttgctctatcagtaaaatcaatgaaaccagagctttttccggctagtgcttctgtgatatggaaagggcacccagagcagcaggacctatagccacgttatgtcagcaatgaagactttgaagtgaacccttgctataattttttagagatttaaaatttatggtagacatttaggacaacataagcaagtagagttctgcagttttttgaagtttacaaattgccccattctgaagaattattctttcccagttactcaggttatgaatgaattaggttttcaacatgggaagcatgaaatccacttctggatttggagcatccacttgaggagcagaggtggcagcagaggattctgagccaccaactgcagtagtggctcctttggctttgggcagcctggctgtggagtttccacggcgacacacagcctcagtggtgcaagatttaaaattaccttcctttttggctggaagacttagaagccgcctgatcatactttctcattttacagatgaggaaataaagcctacaagtgtgaaattaatttccttacagttttcctagctgatgagggacagaaccagaactagagcctgagcccaacccacatcactattcttctaacccttcctgaagttgtgatgctcatgctgaaatttaagatgccaaatatttttgccagcactttttcagttgggagaatcaccagggtttaaatgtcagatttatttttatgtggatccctgtgtatgctgaactacagagcatgatgtttaatctaatttaaggagccactgattgtaaaacatgccattattttatgttgcactaagaaggtggggtcgaggagttgccaataaacttgggacagactattgatggccaagcccatctgaatttaagatgctaaagtatgaaaaaaatacatcttagaatcaatgaaataccatattttgattccattcctcaagataattttagagttataaaaccagtcctcaattttgggtcttcacagagaatctttcccttgctagaccccagaattttaaatgcatccgtcttacactttcacaaatatttgggttttcctttttcactcacaaacagcagggaggtcatgtactttttgtacaacacctgtgcactatgagaaaatggtaccttttagttattgacaagttaaaatagcactctcagtttttcagtattacagagagcaaatagtttcctctcctgctctgtgcagtagcttttccagaactatggacaaattgatcagaagaagattgattatttcctcatctttttttcttttttttgagacagagtctctctctgtcccccaggctgaagtgcagcggcatgatctcagctcactgcaacctctgcctcccgggttcaagtgattctcctgcctcagcctcctgagtagctgggattacaggcacccaccaccacacctggctaattttttgtatttttagtagagacagggttttaccatgttggtcaggctggtctcaaactcctgacctcaggtgatccacctgcctcggcctcccaaagtgctgggattacaggcgtgagccactgcgcccggcctatttccccacctttcgtgtaaggtgctactgaacatgacagcttcttgtcatgacaggaaacttgcatcagttggatatccttttgagaaactgaattttgcaaagggccaaatttccccaaactgaacgggctcaggaaatgttcctttacactcagaacattctattttaagtatattatttattgttggcagttcctcagggatttcccttttctctgtattggtcagtgtagttgatgtaaaaccgttttgtggatggaaaatatttttattttattgctcttttagtttggtaggttaaataaaggttcttggtaatttgggaaaaaaaaaaaaaaaaaaaaaaaaaaaaaaa

SEQ ID NO: 481 - DNA, 2966 bp, Homo sapiens
cgcccgagccgcgcgcggagctgccgggggctccttagcacccgggcgccggggccctcgcccttccgcagccttcactccagccctctgctcccgcacgccatgaagtcgccgttctaccgctgccagaacaccacctctgtggaaaaaggcaactcggcggtgatgggcggggtgctcttcagcaccggcctcctgggcaacctgctggccctggggctgctggcgcgctcggggctggggtggtgctcgcggcgtccactgcgcccgctgccctcggtcttctacatgctggtgtgtggcctgacggtcaccgacttgctgggcaagtgcctcctaagcccggtggtgctggctgcctacgctcagaaccggagtctgcgggtgcttgcgcccgcattggacaactcgttgtgccaagccttcgccttcttcatgtccttctttgggctctcctcgacactgcaactcctggccatggcactggagtgctggctctccctagggcaccctttcttctaccgacggcacatcaccctgcgcctgggcgcactggtggccccggtggtgagcgccttctccctggctttctgcgcgctacctttcatgggcttcgggaagttcgtgcagtactgccccggcacctggtgctttatccagatggtccacgaggagggctcgctgtcggtgctggggtactctgtgctctactccagcctcatggcgctgctggtcctcgccaccgtgctgtgcaacctcggcgccatgcgcaacctctatgcgatgcaccggcggctgcagcggcacccgcgctcctgcaccagggactgtgccgagccgcgcgcggacgggagggaagcgtcccctcagcccctggaggagctggatcacctcctgctgctggcgctgatgaccgtgctcttcactatgtgttctctgcccgtaatttatcgcgcttactatggagcatttaaggatgtcaaggagaaaaacaggacctctgaagaagcagaagacctccgagccttgcgatttctatctgtgatttcaattgtggacccttggatttttatcattttcagatctccagtatttcggatattttttcacaagattttcattagacctcttaggtacaggagccggtgcagcaattccactaacatggaatccagtctgtgacagtgtttttcactctgtggtaagctgaggaatatgtcacattttcagtcaaagaaccatgattaaaaaaaaaaagacaacttacaatttaaatccttaaaagttacctcccataacaaaagcatgtatatgtattttcaaaagtatttgatatcttaacaatgtgttaccattctatagtcatgaaccccttcagtgcattttcatttttttattaacagcaactaaaattttatatattgtaaccagtgttaaaagtcttaaaaaacaatggtattaattgtccctacatttgtgcttggtggccctattttttttttttagagaggccttgagacatacaggtcttttaaaatacagtagaaacaccactgtttacgattatacgatggacattcataaaaagcataatttcttaccctattcattttttggtgaaacctgattcattgattttatatcattgccgatgtttagttcatttctttgccaattgatctaagcatagcctgaattatgatgttcctcagagaagtgaggtgggaaatatgaccaggtcaggcagttggaggggcttccccagccaccatcggggagtacttgctgcctcaggtggagacctgaagctgtaactagatgcagagcaagatatgactatagcccacaacccaaagaagcaaaaattcgtttttatcttttgaaatccagtttcttttgtattgagtcaagggtgtcagtaggaatcaaaagttgggggtgggttgcaaaatgttctttcagtttttagaacctccattttataaaagaattatcctatcaatggattctttagtggaaggatttatgcttctttgaaaaccagtgtgtgactcactgtagagccatgtttactgtttgactgtgtggcacaggggggcatttggcacagcaaaaagcccacccaggacttagcctcagttgacgatagtaacaatggccttaacatctaccttaacagctacctattacagccgtattctgctgtccgtggagacggtaagatcttaggttccaagattttacttcaaattacaccttcaaaactggagcagcatatagccgaaaaggagcacaactgagcactttaatagtaatttaaaagttttcaagggtcagcaatatgatgactgaaagggaaaagtggaggaaacgcagctgcaactgaagcggagactctaaacccagcttgcaggtaagagctttcacctttggtaaaagaacagctggggaggttcaaggggtttcagcatctctggagttcctttgtatctgacaatctcaggactccaaggtgcaaagcctgctgcatttgcgtgatctcaagacctccagccagaagtcccttccaaatataagagtactcatgtttatttatttccaactgagcagcaacctcctttgtttcacttatgttttttccagtatctgagataatataaagctgggtaattttttatgtaattttttggtatagcaaaactgtgaaaaagccaaattaggcatacaaggagtatgatttaacagtatgacatgatgaaaaaaatacagttgtttttgaaatttaacttttgtttgtaccttcaatgtgtaagtacatgcatgttttattgtcagaggaagaacatgttttttgtattctttttttggagaggtgtgttaggataattgtccagttaatttgaaaaggccccagatgaatcaataaatataattttatagtaaaaaaaaaaaaaaaaaaaaaaaaa

SEQ ID NO: 482 - DNA, 4982 bp, Homo sapiens
aggtgacagctggagggaggagcgggggtggagccgggggaagggtggggaggggatgggctggagctccgggcagtgtgcgaggcgcacgcacaggagcctgcactctgcgtcccgcaccccagcagccgcgccatgagccggagtctcttgctctggttcttgctgttcctgctcctgctcccgccgctccccgtcctgctcgcggacccaggggcgcccacgccagtgaatccctgttgttactatccatgccagcaccagggcatctgtgtccgcttcggccttgaccgctaccagtgtgactgcacccgcacgggctattccggccccaactgcaccatccctggcctgtggacctggctccggaattcactgcggcccagcccctctttcacccacttcctgctcactcacgggcgctggttctgggagtttgtcaatgccaccttcatccgagagatgctcatgcgcctggtactcacagtgcgctccaaccttatccccagtccccccacctacaactcagcacatgactacatcagctgggagtctttctccaacgtgagctattacactcgtattctgccctctgtgcctaaagattgccccacacccatgggaaccaaagggaagaagcagttgccagatgcccagctcctggcccgccgcttcctgctcaggaggaagttcatacctgacccccaaggcaccaacctcatgtttgccttctttgcacaacacttcacccaccagttcttcaaaacttctggcaagatgggtcctggcttcaccaaggccttgggccatggggtagacctcggccacatttatggagacaatctggagcgtcagtatcaactgcggctctttaaggatgggaaactcaagtaccaggtgctggatggagaaatgtacccgccctcggtagaagaggcgcctgtgttgatgcactacccccgaggcatcccgccccagagccagatggctgtgggccaggaggtgtttgggctgcttcctgggctcatgctgtatgccacgctctggctacgtgagcacaaccgtgtgtgtgacctgctgaaggctgagcaccccacctggggcgatgagcagcttttccagacgacccgcctcatcctcataggggagaccatcaagattgtcatcgaggagtacgtgcagcagctgagtggctatttcctgcagctgaaatttgacccagagctgctgttcggtgtccagttccaataccgcaaccgcattgccatggagttcaaccatctctaccactggcaccccctcatgcctgactccttcaagatcggtgggggcaggaacatggaccaccacatcctgcatgtggctgtggatgtcatcagggagtctcgggagatgcggctgcagcccttcaatgagtaccgcaagaggtttggcatgaaaccctacacctccttccaggagctcgtaggagagaaggagatggcagcagagttggaggaattgtatggagacattgatgcgttggagttctaccctggactgcttcttgaaaagtgccatccaaactctatctttggggagagtatgatagagattggggctcccttttccctcaagggtctcctagggaatcccatctgttctccggagtactggaagccgagcacatttggcggcgaggtgggctttaacattgtcaagacggccacactgaagaagctggtctgcctcaacaccaagacctgtccctacgtttccttccgtgtgccggatgccagtcaggatgatgggcctgctgtggagcgaccatccacagagctctgaggggcaggaaagcagcattctggaggggagagctttgtgcttgtcattccagagtgctgaggccagggctgatggtcttaaatgctcattttctggtttggcatggtgagtgttggggttgacatttagaactttaagtctcacccattatctggaatattgtgattctgtttattcttccagaatgctgaactccttgttagcccttcagattgttaggagtggttctcatttggtctgccagaatactgggttcttagttgacaacctagaatgtcagatttctggttgatttgtaacacagtcattctaggatgtggagctactgatgaaatctgctagaaagttagggggttcttattttgcattccagaatcttgactttctgattggtgattcaaagtgttgtgttcctggctgatgatccagaacagtggctcgtatcccaaatctgtcagcatctggctgtctagaatgtggatttgattcattttcctgttcagtgagatatcatagagacggagatcctaaggtccaacaagaatgcattccctgaatctgtgcctgcactgagagggcaaggaagtggggtgttcttcttgggacccccactaagaccctggtctgaggatgtagagagaacaggtgggctgtattcacgccattggttggaagctaccagagctctatccccatccaggtcttgactcatggcagctgtttctcatgaagctaataaaattcgctttctaaagttacctgttatatatctcttttggtcccatcctctaaagcagaggcaacactggaacatggctagcctttcttgtagccatggctgggcgtgctagaggttgcagcatgagactttctgctgggatccttgggcccatcactgtatagacatgctaccactggtacttcctttctccctgcgggccaggcactgcccttttcaggaagctctcttaaaatacccattgccccagacctggaagatataacattcagttcccaccatctgattaaaacaacttcctcccttacagagcatacaacagagggggcacccggggaggagagcacatactgtgttccaatttcacgcttttaattctcatttgttctcacaccaacagtgtgaagtgcgtggtataatctccatttcaaaaccaaggaagcagcctcagagtggtcgagtgacacacctcacgcaggctgagtccagagcttgtgctcctcttgattcctggtttgactcagttccaggcctgatcttgcctgtctggctcagggtcaaagacagaatggtggagtgtagcctccacctgatattcaggctactcattcagtcccaaatatgtattttcctaagtgtttactatgtgccagttcctgtaacaggtgtggggacacagcagtgagtaatcaatacagacaaggttctgcccttatggagctcacactccagtggcagacaaacagaccataaataaggaaacgatgaaataagatatatacaaggtgagtgtgacttcccttctaaccccctctgctctgtcctcccctattgcgctctcaagaccagagacccaacagcagtgatctcagggcagacagccctccactccagctctgagacccttttctcaggacctctgtaggcagcagagagagaggacagaggggtaagatgaggggttgagggaaggttcttcatgatccacactttgggcttagtatttctcaggaagagctatggcccagaaacaacaggggaaactagagttcggtctgacagtccttggggttaagtctcctgtcttatggtccagaaactcctgtttctccttagttggctggaaactgctcccatcattccttctggcctctgctgaatgcagggaatgcaatccttccctgctcttgcagttgctctgacgtagaaagatccttcgggtgctggaagtctccatgaagagcttgtgtcctgtcctttcttgcagattctatttcccctcttctgctaatacctcttactttgcttgagaatcctctcctttcttattaatttcagtcttggtggttctatcaggggtgcattctggccaaggggtgggcctgtgaatcaatcctgggcaatcagacaccctctccttaaaaactggcccgtggagactgagatcactgactctgactcatccccacagctggctctgacaagatggtccatttgttcctgcttccgagatccccagggcagcctggatccctgcccttctcaagactttagcttttccttccatccggtggcctattccaggaattcctcttttgcttaaatcagttggagtttgtgtctgttgcttgtaatcaagcctttatggctgctgggctgagtgacacaagcactttaatggcctggagggacttttaatcagtgaagatgcaatcagacaagtgttttggaaagagcaccctcgagaagggtggatgacagggcagagcaggaaggacaggaagctggcagaacggaggaggctgcagccgtggtccaaccaggagctgatggcagctggggctaggggaagggctttgagggtggaaggatgggatgggttccagaggtattcctctcttaaatgcaagtgcctagattaggtagactttgcttagtattgacaactgcacatgaaagttttgcaaagggaaacaggctaaatgcaccaagaaagcttcttcagagtgaagaatcttaatgcttgtaatttaaacatttgttcctggagttttgatttggtggatgtgatggttggttttatttgtcagtttggttgggctatagcacacagttatttaatcaaacagtaatctaggtgtggctgtgaaggtattttgtagatgtgattaacatctacaatcagttgactttaagtgaaagagattacttaaataatttgggtgagctgcacctgattagttgaaaggcctcaagaacaaacactgcagtttcctggaaaagaagaaactttgcctcaagactatagccatcgactcctgcctgagtttccagcctgctagtctgccctatggatttgaagtttgccaaccccaacaattgtgtgaattaatttctaaaaataaagctatatacagcc

SEQ ID NO: 483 - DNA, 5093 bp, Homo sapiens
aggtgacagctggagggaggagcgggggtggagccgggggaagggtggggaggggatgggctggagctccgggcagtgtgcgaggcgcacgcacaggagcctgcactctgcgtcccgcaccccagcagccgcgccatgagccggagtctcttgctctggttcttgctgttcctgctcctgctcccgccgctccccgtcctgctcgcggacccaggggcgcccacgccagtgaatccctgttgttactatccatgccagcaccagggcatctgtgtccgcttcggccttgaccgctaccagtgtgactgcacccgcacgggctattccggccccaactgcaccatccctggcctgtggacctggctccggaattcactgcggcccagcccctctttcacccacttcctgctcactcacgggcgctggttctgggagtttgtcaatgccaccttcatccgagagatgctcatgcgcctggtactcacagtgcgctccaaccttatccccagtccccccacctacaactcagcacatgactacatcagctgggagtctttctccaacgtgagctattacactcgtattctgccctctgtgcctaaagattgccccacacccatgggaaccaaagggaagaagcagttgccagatgcccagctcctggcccgccgcttcctgctcaggaggaagttcatacctgacccccaaggcaccaacctcatgtttgccttctttgcacaacacttcacccaccagttcttcaaaacttctggcaagatgggtcctggcttcaccaaggccttgggccatggggtagacctcggccacatttatggagacaatctggagcgtcagtatcaactgcggctctttaaggatgggaaactcaagtaccaggtgctggatggagaaatgtacccgccctcggtagaagaggcgcctgtgttgatgcactacccccgaggcatcccgccccagagccagatggctgtgggccaggaggtgtttgggctgcttcctgggctcatgctgtatgccacgctctggctacgtgagcacaaccgtgtgtgtgacctgctgaaggctgagcaccccacctggggcgatgagcagcttttccagacgacccgcctcatcctcataggggagaccatcaagattgtcatcgaggagtacgtgcagcagctgagtggctatttcctgcagctgaaatttgacccagagctgctgttcggtgtccagttccaataccgcaaccgcattgccatggagttcaaccatctctaccactggcaccccctcatgcctgactccttcaaggtgggctcccaggagtacagctacgagcagttcttgttcaacacctccatgttggtggactatggggttgaggccctggtggatgccttctctcgccagattgctggccggatcggtgggggcaggaacatggaccaccacatcctgcatgtggctgtggatgtcatcagggagtctcgggagatgcggctgcagcccttcaatgagtaccgcaagaggtttggcatgaaaccctacacctccttccaggagctcgtaggagagaaggagatggcagcagagttggaggaattgtatggagacattgatgcgttggagttctaccctggactgcttcttgaaaagtgccatccaaactctatctttggggagagtatgatagagattggggctcccttttccctcaagggtctcctagggaatcccatctgttctccggagtactggaagccgagcacatttggcggcgaggtgggctttaacattgtcaagacggccacactgaagaagctggtctgcctcaacaccaagacctgtccctacgtttccttccgtgtgccggatgccagtcaggatgatgggcctgctgtggagcgaccatccacagagctctgaggggcaggaaagcagcattctggaggggagagctttgtgcttgtcattccagagtgctgaggccagggctgatggtcttaaatgctcattttctggtttggcatggtgagtgttggggttgacatttagaactttaagtctcacccattatctggaatattgtgattctgtttattcttccagaatgctgaactccttgttagcccttcagattgttaggagtggttctcatttggtctgccagaatactgggttcttagttgacaacctagaatgtcagatttctggttgatttgtaacacagtcattctaggatgtggagctactgatgaaatctgctagaaagttagggggttcttattttgcattccagaatcttgactttctgattggtgattcaaagtgttgtgttcctggctgatgatccagaacagtggctcgtatcccaaatctgtcagcatctggctgtctagaatgtggatttgattcattttcctgttcagtgagatatcatagagacggagatcctaaggtccaacaagaatgcattccctgaatctgtgcctgcactgagagggcaaggaagtggggtgttcttcttgggacccccactaagaccctggtctgaggatgtagagagaacaggtgggctgtattcacgccattggttggaagctaccagagctctatccccatccaggtcttgactcatggcagctgtttctcatgaagctaataaaattcgctttctaaagttacctgttatatatctcttttggtcccatcctctaaagcagaggcaacactggaacatggctagcctttcttgtagccatggctgggcgtgctagaggttgcagcatgagactttctgctgggatccttgggcccatcactgtatagacatgctaccactggtacttcctttctccctgcgggccaggcactgcccttttcaggaagctctcttaaaatacccattgccccagacctggaagatataacattcagttcccaccatctgattaaaacaacttcctcccttacagagcatacaacagagggggcacccggggaggagagcacatactgtgttccaatttcacgcttttaattctcatttgttctcacaccaacagtgtgaagtgcgtggtataatctccatttcaaaaccaaggaagcagcctcagagtggtcgagtgacacacctcacgcaggctgagtccagagcttgtgctcctcttgattcctggtttgactcagttccaggcctgatcttgcctgtctggctcagggtcaaagacagaatggtggagtgtagcctccacctgatattcaggctactcattcagtcccaaatatgtattttcctaagtgtttactatgtgccagttcctgtaacaggtgtggggacacagcagtgagtaatcaatacagacaaggttctgcccttatggagctcacactccagtggcagacaaacagaccataaataaggaaacgatgaaataagatatatacaaggtgagtgtgacttcccttctaaccccctctgctctgtcctcccctattgcgctctcaagaccagagacccaacagcagtgatctcagggcagacagccctccactccagctctgagacccttttctcaggacctctgtaggcagcagagagagaggacagaggggtaagatgaggggttgagggaaggttcttcatgatccacactttgggcttagtatttctcaggaagagctatggcccagaaacaacaggggaaactagagttcggtctgacagtccttggggttaagtctcctgtcttatggtccagaaactcctgtttctccttagttggctggaaactgctcccatcattccttctggcctctgctgaatgcagggaatgcaatccttccctgctcttgcagttgctctgacgtagaaagatccttcgggtgctggaagtctccatgaagagcttgtgtcctgtcctttcttgcagattctatttcccctcttctgctaatacctcttactttgcttgagaatcctctcctttcttattaatttcagtcttggtggttctatcaggggtgcattctggccaaggggtgggcctgtgaatcaatcctgggcaatcagacaccctctccttaaaaactggcccgtggagactgagatcactgactctgactcatccccacagctggctctgacaagatggtccatttgttcctgcttccgagatccccagggcagcctggatccctgcccttctcaagactttagcttttccttccatccggtggcctattccaggaattcctcttttgcttaaatcagttggagtttgtgtctgttgcttgtaatcaagcctttatggctgctgggctgagtgacacaagcactttaatggcctggagggacttttaatcagtgaagatgcaatcagacaagtgttttggaaagagcaccctcgagaagggtggatgacagggcagagcaggaaggacaggaagctggcagaacggaggaggctgcagccgtggtccaaccaggagctgatggcagctggggctaggggaagggctttgagggtggaaggatgggatgggttccagaggtattcctctcttaaatgcaagtgcctagattaggtagactttgcttagtattgacaactgcacatgaaagttttgcaaagggaaacaggctaaatgcaccaagaaagcttcttcagagtgaagaatcttaatgcttgtaatttaaacatttgttcctggagttttgatttggtggatgtgatggttggttttatttgtcagtttggttgggctatagcacacagttatttaatcaaacagtaatctaggtgtggctgtgaaggtattttgtagatgtgattaacatctacaatcagttgactttaagtgaaagagattacttaaataatttgggtgagctgcacctgattagttgaaaggcctcaagaacaaacactgcagtttcctggaaaagaagaaactttgcctcaagactatagccatcgactcctgcctgagtttccagcctgctagtctgccctatggatttgaagtttgccaaccccaacaattgtgtgaattaatttctaaaaataaagctatatacagcc

SEQ ID NO: 484 - DNA, 4465 bp, Homo sapiens
caattgtcatacgacttgcagtgagcgtcaggagcacgtccaggaactcctcagcagcgcctccttcagctccacagccagacgccctcagacagcaaagcctacccccgcgccgcgccctgcccgccgctcggatgctcgcccgcgccctgctgctgtgcgcggtcctggcgctcagccatacagcaaatccttgctgttcccacccatgtcaaaaccgaggtgtatgtatgagtgtgggatttgaccagtataagtgcgattgtacccggacaggattctatggagaaaactgctcaacaccggaatttttgacaagaataaaattatttctgaaacccactccaaacacagtgcactacatacttacccacttcaagggattttggaacgttgtgaataacattcccttccttcgaaatgcaattatgagttatgtcttgacatccagatcacatttgattgacagtccaccaacttacaatgctgactatggctacaaaagctgggaagccttctctaacctctcctattatactagagcccttcctcctgtgcctgatgattgcccgactcccttgggtgtcaaaggtaaaaagcagcttcctgattcaaatgagattgtggaaaaattgcttctaagaagaaagttcatccctgatccccagggctcaaacatgatgtttgcattctttgcccagcacttcacgcatcagtttttcaagacagatcataagcgagggccagctttcaccaacgggctgggccatggggtggacttaaatcatatttacggtgaaactctggctagacagcgtaaactgcgccttttcaaggatggaaaaatgaaatatcagataattgatggagagatgtatcctcccacagtcaaagatactcaggcagagatgatctaccctcctcaagtccctgagcatctacggtttgctgtggggcaggaggtctttggtctggtgcctggtctgatgatgtatgccacaatctggctgcgggaacacaacagagtatgcgatgtgcttaaacaggagcatcctgaatggggtgatgagcagttgttccagacaagcaggctaatactgataggagagactattaagattgtgattgaagattatgtgcaacacttgagtggctatcacttcaaactgaaatttgacccagaactacttttcaacaaacaattccagtaccaaaatcgtattgctgctgaatttaacaccctctatcactggcatccccttctgcctgacacctttcaaattcatgaccagaaatacaactatcaacagtttatctacaacaactctatattgctggaacatggaattacccagtttgttgaatcattcaccaggcaaattgctggcagggttgctggtggtaggaatgttccacccgcagtacagaaagtatcacaggcttccattgaccagagcaggcagatgaaataccagtcttttaatgagtaccgcaaacgctttatgctgaagccctatgaatcatttgaagaacttacaggagaaaaggaaatgtctgcagagttggaagcactctatggtgacatcgatgctgtggagctgtatcctgcccttctggtagaaaagcctcggccagatgccatctttggtgaaaccatggtagaagttggagcaccattctccttgaaaggacttatgggtaatgttatatgttctcctgcctactggaagccaagcacttttggtggagaagtgggttttcaaatcatcaacactgcctcaattcagtctctcatctgcaataacgtgaagggctgtccctttacttcattcagtgttccagatccagagctcattaaaacagtcaccatcaatgcaagttcttcccgctccggactagatgatatcaatcccacagtactactaaaagaacgttcgactgaactgtagaagtctaatgatcatatttatttatttatatgaaccatgtctattaatttaattatttaataatatttatattaaactccttatgttacttaacatcttctgtaacagaagtcagtactcctgttgcggagaaaggagtcatacttgtgaagacttttatgtcactactctaaagattttgctgttgctgttaagtttggaaaacagtttttattctgttttataaaccagagagaaatgagttttgacgtctttttacttgaatttcaacttatattataagaacgaaagtaaagatgtttgaatacttaaacactatcacaagatggcaaaatgctgaaagtttttacactgtcgatgtttccaatgcatcttccatgatgcattagaagtaactaatgtttgaaattttaaagtacttttggttatttttctgtcatcaaacaaaaacaggtatcagtgcattattaaatgaatatttaaattagacattaccagtaatttcatgtctactttttaaaatcagcaatgaaacaataatttgaaatttctaaattcatagggtagaatcacctgtaaaagcttgtttgatttcttaaagttattaaacttgtacatataccaaaaagaagctgtcttggatttaaatctgtaaaatcagatgaaattttactacaattgcttgttaaaatattttataagtgatgttcctttttcaccaagagtataaacctttttagtgtgactgttaaaacttccttttaaatcaaaatgccaaatttattaaggtggtggagccactgcagtgttatctcaaaataagaatattttgttgagatattccagaatttgtttatatggctggtaacatgtaaaatctatatcagcaaaagggtctacctttaaaataagcaataacaaagaagaaaaccaaattattgttcaaatttaggtttaaacttttgaagcaaacttttttttatccttgtgcactgcaggcctggtactcagattttgctatgaggttaatgaagtaccaagctgtgcttgaataacgatatgttttctcagattttctgttgtacagtttaatttagcagtccatatcacattgcaaaagtagcaatgacctcataaaatacctcttcaaaatgcttaaattcatttcacacattaattttatctcagtcttgaagccaattcagtaggtgcattggaatcaagcctggctacctgcatgctgttccttttcttttcttcttttagccattttgctaagagacacagtcttctcatcacttcgtttctcctattttgttttactagttttaagatcagagttcactttctttggactctgcctatattttcttacctgaacttttgcaagttttcaggtaaacctcagctcaggactgctatttagctcctcttaagaagattaaaagagaaaaaaaaaggcccttttaaaaatagtatacacttattttaagtgaaaagcagagaattttatttatagctaattttagctatctgtaaccaagatggatgcaaagaggctagtgcctcagagagaactgtacggggtttgtgactggaaaaagttacgttcccattctaattaatgccctttcttatttaaaaacaaaaccaaatgatatctaagtagttctcagcaataataataatgacgataatacttcttttccacatctcattgtcactgacatttaatggtactgtatattacttaatttattgaagattattatttatgtcttattaggacactatggttataaactgtgtttaagcctacaatcattgatttttttttgttatgtcacaatcagtatattttctttggggttacctctctgaatattatgtaaacaatccaaagaaatgattgtattaagatttgtgaataaatttttagaaatctgattggcatattgagatatttaaggttgaatgtttgtccttaggataggcctatgtgctagcccacaaagaatattgtctcattagcctgaatgtgccataagactgaccttttaaaatgttttgagggatctgtggatgcttcgttaatttgttcagccacaatttattgagaaaatattctgtgtcaagcactgtgggttttaatatttttaaatcaaacgctgattacagataatagtatttatataaataattgaaaaaaattttcttttgggaagagggagaaaatgaaataaatatcattaaagataactcaggagaatcttctttacaattttacgtttagaatgtttaaggttaagaaagaaatagtcaatatgcttgtataaaacactgttcactgttttttttaaaaaaaaaacttgatttgttattaacattgatctgctgacaaaacctgggaatttgggttgtgtatgcgaatgtttcagtgcctcagacaaatgtgtatttaacttatgtaaaagataagtctggaaataaatgtctgtttatttttgtactattta

SEQ ID NO: 485 - DNA, 8119 bp, Homo sapiens
cgtccctgcagccctcgcccggcgctccagtagcaggacccggtctcgggaccagccggtaatatgcacgtgtcactagctgaggccctggaggttcggggtggaccacttcaggaggaagaaatatgggctgtattaaatcaaagtgctgaaagtctccaagaattattcagaaaagtaagcctagctgatcctgctgcccttggcttcatcatttctccatggtctctgctgttgctgccatctggtagtgtgtcatttacagatgaaaatatttccaatcaggatcttcgagcattcactgcaccagaggttcttcaaaatcagtcactaacttctctctcagatgttgaaaagatccacatttattctcttggaatgacactgtattggggggctgattatgaagtgcctcagagccaacctattaagcttggagatcatctcaacagcatactgcttggaatgtgtgaggatgttatttacgctcgagtttctgttcggactgtgctggatgcttgcagtgcccacattaggaatagcaattgtgcaccctcattttcctacgtgaaacacttggtaaaactggttctgggaaatctttctgggacagatcagctttcctgtaacagtgaacaaaagcctgatcgaagccaggctattcgagatcgattgcgaggaaaaggattaccaacaggaagaagctctacttctgatgtactagacatacaaaagcctccactctctcatcagacctttcttaacaaagggcttagtaaatctatgggatttctgtccatcaaagatacacaagatgagaattatttcaaggacattttatcagataattctggacgtgaagattctgaaaatacattctccccttaccagttcaaaactagtggcccagaaaaaaaacccatccctggcattgatgtgctttctaagaagaagatctgggcttcatccatggacttgctttgtacagctgacagagacttctcttcaggagagactgccacatatcgtcgttgtcaccctgaggcagtaacagtgcggacttcaactactcctagaaaaaaggaggcaagatactcagatggaagtatagccttggatatctttggccctcagaaaatggatccaatatatcacactcgagaattgcccacctcctcagcaatatcaagtgctttggaccgaatccgagagagacaaaagaaacttcaggttctgagggaagccatgaatgtagaagaaccagttcgaagatacaaaacttatcatggtgatgtctttagtacctccagtgaaagtccatctattatttcctctgaatcagatttcagacaagtgagaagaagtgaagcctcaaagaggtttgaatccagcagtggtctcccaggggtagatgaaaccttaagtcaaggccagtcacagagaccgagcagacaatatgaaacaccctttgaaggcaacttaattaatcaagagatcatgctaaaacggcaagaggaagaactgatgcagctacaagccaaaatggcccttagacagtctcggttgagcctatatccaggagacacaatcaaagcgtccatgcttgacatcaccagggatccgttaagagaaattgccctagaaacagccatgactcaaagaaaactgaggaatttctttggccctgagtttgtgaaaatgacaattgaaccatttatatctttggatttgccacggtctattcttactaagaaagggaagaatgaggataaccgaaggaaagtaaacataatgcttctgaacgggcaaagactggaactgacctgtgataccaaaactatatgtaaagatgtgtttgatatggttgtggcacatattggcttagtagagcatcatttgtttgctttagctaccctcaaagataatgaatatttctttgttgatcctgacttaaaattaaccaaagtggccccagagggatggaaagaagaaccaaagaaaaagaccaaagccactgttaattttactttgtttttcagaattaaattttttatggatgatgttagtctaatacaacatactctgacgtgtcatcagtattaccttcagcttcgaaaagatattttggaggaaaggatgcactgtgatgatgagacttccttattgctggcatccttggctctccaggctgagtatggagattatcaaccagaggttcatggtgtgtcttactttagaatggagcactatttgcccgccagagtgatggagaaacttgatttatcctatatcaaagaagagttacccaaattgcataatacctatgtgggagcttctgaaaaagagacagagttagaatttttaaaggtctgccaaagactgacagaatatggagttcattttcaccgagtgcaccctgagaagaagtcacaaacaggaatattgcttggagtctgttctaaaggtgtccttgtgtttgaagttcacaatggagtgcgcacattggtccttcgctttccatggagggaaaccaagaaaatatctttttctaaaaagaaaatcacattgcaaaatacatcagatggaataaaacatggcttccagacagacaacagtaagatatgccagtacctgctgcacctctgctcttaccagcataagttccagctacagatgagagcaagacagagcaaccaagatgcccaagatattgagagagcttcgtttaggagcctgaatctccaagcagagtctgttagaggatttaatatgggacgagcaatcagcactggcagtctggccagcagcaccctcaacaaacttgctgttcgacctttatcagttcaagctgagattctgaagaggctatcctgctcagagctgtcgctttaccagccattgcaaaacagttcaaaagagaagaatgacaaagcttcatgggaggaaaagcctagagagatgagtaaatcataccatgatctcagtcaggcctctctctatccacatcggaaaaatgtcattgttaacatggaacccccaccacaaaccgttgcagagttggtgggaaaaccttctcaccagatgtcaagatctgatgcagaatctttggcaggagtgacaaaacttaataattcaaagtctgttgcgagtttaaatagaagtcctgaaaggaggaaacatgaatcagactcctcatccattgaagaccctgggcaagcatatgttctaggaatgactatgcatagttctggaaactcttcatcccaagtacccttaaaagaaaatgatgtgctacacaaaagatggagcatagtatcttcaccagaaagggagatcaccttagtgaacctgaaaaaagatgcaaagtatggcttgggatttcaaattattggtggggagaagatgggaagactggacctaggcatatttatcagttcagttgcccctggaggaccagctgacttggatggatgcttgaagccaggagaccgtttgatatctgtgaatagtgtgagtctggagggagtcagccaccatgctgcaattgaaattttgcaaaatgcacctgaagatgtgacacttgttatctctcagccaaaagaaaagatatccaaagtgccttctactcctgtgcatctcaccaatgagatgaaaaactacatgaagaaatcttcctacatgcaagacagtgctatagattcttcttccaaggatcaccactggtcacgtggtaccctgaggcacatctcggagaactcctttgggccatctgggggcctgcgggaaggaagcctgagttctcaagattccaggactgagagtgccagcttgtctcaaagccaggtcaatggtttctttgccagccatttaggtgaccaaacctggcaggaatcacagcatggcagcccttccccatctgtaatatccaaagccaccgagaaagagactttcactgatagtaaccaaagcaaaactaaaaagccaggcatttctgatgtaactgattactcagaccgtggagattcagacatggatgaagccacttactccagcagtcaggatcatcaaacaccaaaacaggaatcttcctcttcagtgaatacatccaacaagatgaattttaaaactttttcttcatcacctcctaagcctggagatatctttgaggttgaactggctaaaaatgataacagcttggggataagtgtcacgggaggtgtgaatacgagtgtcagacatggtggcatttatgtgaaagctgttattccccagggagcagcagagtctgatggtagaattcacaaaggtgatcgcgtcctagctgtcaatggagttagtctagaaggagccacccataagcaagctgtggaaacactgagaaatacaggacaggtggttcatctgttattagaaaagggacaatctccaacatctaaagaacatgtcccggtaaccccacagtgtaccctttcagatcagaatgcccaaggtcaaggcccagaaaaagtgaagaaaacaactcaggtcaaagactacagctttgtcactgaagaaaatacatttgaggtaaaattatttaaaaatagctcaggtctaggattcagtttttctcgagaagataatcttataccggagcaaattaatgccagcatagtaagggttaaaaagctctttcctggacagccagcagcagaaagtggaaaaattgatgtaggagatgttatcttgaaagtgaatggagcctctttgaaaggactatctcagcaggaagtcatatctgctctcaggggaactgctccagaagtattcttgcttctctgcagacctccacctggtgtgctaccggaaattgatactgcgcttttgaccccacttcagtctccagcacaagtacttccaaacagcagtaaagactcttctcagccatcatgtgtggagcaaagcaccagctcagatgaaaatgaaatgtcagacaaaagcaaaaaacagtgcaagtccccatccagaagagacagttacagtgacagcagtgggagtggagaagatgacttagtgacagctccagcaaacatatcaaattcgacctggagttcagctttgcatcagactctaagcaacatggtatcacaggcacagagtcatcatgaagcacccaagagtcaagaagataccatttgtaccatgttttactatcctcagaaaattcccaataaaccagagtttgaggacagtaatccttcccctctaccaccggatatggctcctgggcagagttatcaaccccaatcagaatctgcttcctctagttcgatggataagtatcatatacatcacatttctgaaccaactagacaagaaaactggacacctttgaaaaatgacttggaaaatcaccttgaagactttgaactggaagtagaactcctcattaccctaattaaatcagaaaaaggaagcctgggttttacagtaaccaaaggcaatcagagaattggttgttatgttcatgatgtcatacaggatccagccaaaagtgatggaaggctaaaacctggggaccggctcataaaggttaatgatacagatgttactaatatgactcatacagatgcagttaatctgctccgggctgcatccaaaacagtcagattagttattggacgagttctagaattacccagaataccaatgttgcctcatttgctaccggacataacactaacgtgcaacaaagaggagttgggtttttccttatgtggaggtcatgacagcctttatcaagtggtatatattagtgatattaatccaaggtccgtcgcagccattgagggtaatctccagctattagatgtcatccattatgtgaacggagtcagcacacaaggaatgaccttggaggaagttaacagagcattagacatgtcacttccttcattggtattgaaagcaacaagaaatgatcttccagtggtccccagctcaaagaggtctgctgtttcagctccaaagtcaaccaaaggcaatggttcctacagtgtggggtcttgcagccagcctgccctcactcctaatgattcattctccacggttgctggggaagaaataaatgaaatatcgtaccccaaaggaaaatgttctacttatcagataaagggatcaccaaacttgactctgcccaaagaatcttatatacaagaagatgacatttatgatgattcccaagaagctgaagttatccagtctctgctggatgttgtggatgaggaagcccagaatcttttaaacgaaaataatgcagcaggatactcctgtggtccaggtacattaaagatgaatgggaagttatcagaagagagaacagaagatacagactgcgatggttcacctttacctgagtattttactgaggccaccaaaatgaatggctgtgaagaatattgtgaagaaaaagtaaaaagtgaaagcttaattcagaagccacaagaaaagaagactgatgatgatgaaataacatggggaaatgatgagttgccaatagagagaacaaaccatgaagattctgataaagatcattcctttctgacaaacgatgagctcgctgtactccctgtcgtcaaagtgcttccctctggtaaatacacgggtgccaacttaaaatcagtcattcgagtcctgcggggtttgctagatcaaggaattccttctaaggagctggagaatcttcaagaattaaaacctttggatcagtgtctaattgggcaaactaaggaaaacagaaggaagaacagatataaaaatatacttccctatgatgctacaagagtgcctcttggagatgaaggtggctatatcaatgccagcttcattaagataccagttgggaaagaagagttcgtttacattgcctgccaaggaccactgcctacaactgttggagacttctggcagatgatttgggagcaaaaatccacagtgatagccatgatgactcaagaagtagaaggagaaaaaatcaaatgccagcgctattggcccaacatcctaggcaaaacaacaatggtcagcaacagacttcgactggctcttgtgagaatgcagcagctgaagggctttgtggtgagggcaatgacccttgaagatattcagaccagagaggtgcgccatatttctcatctgaatttcactgcctggccagaccatgatacaccttctcaaccagatgatctgcttacttttatctcctacatgagacacatccacagatcaggcccaatcattacgcactgcagtgctggcattggacgttcagggaccctgatttgcatagatgtggttctgggattaatcagtcaggatcttgattttgacatctctgatttggtgcgctgcatgagactacaaagacacggaatggttcagacagaggatcaatatattttctgctatcaagtcatcctttatgtcctgacacgtcttcaagcagaagaagagcaaaaacagcagcctcagcttctgaagtgacatgaaaagagcctctggatgcatttccatttctctccttaacctccagcagactcctgctctctatccaaaataaagatcacagagcagcaagttcatacaacatgcatgttctcctctatcttagaggggtattcttcttgaaaataaaaaatattgaaatgctgtatttttacagctactttaacctatgataattatttacaaaattttaacactaaccaaacaatgcagatcttagggatgattaaaggcagcatttgatgatagcagacattgttacaaggacatggtgagtctatttttaatgcaccaatcttgtttatagcaaaaatgttttccaatattttaataaagtagttattttataggggatacttgaaaccagtatttaagctttaaatgacagtaatattggcatagaaaaaagtagcaaatgtttactgtatcaatttctaatgtttactatatagaatttcctgtaatatatttatatactttttcatgaaaatggagttatcagttatctgtttgttactgcatcatctgtttgtaatcattatctcactttgtaaataaaaacacaccttaaaacatg

SEQ ID NO: 486 - DNA, 7546 bp, Homo sapiens
cgtccctgcagccctcgcccggcgctccagtagcaggacccggtctcgggaccagccggtaatatgcacgtgtcactagctgaggccctggaggttcggggtggaccacttcaggaggaagaaatatgggctgtattaaatcaaagtgctgaaagtctccaagaattattcagaaaagtaagcctagctgatcctgctgcccttggcttcatcatttctccatggtctctgctgttgctgccatctggtagtgtgtcatttacagatgaaaatatttccaatcaggatcttcgagcattcactgcaccagaggttcttcaaaatcagtcactaacttctctctcagatgttgaaaagatccacatttattctcttggaatgacactgtattggggggctgattatgaagtgcctcagagccaacctattaagcttggagatcatctcaacagcatactgcttggaatgtgtgaggatgttatttacgctcgagtttctgttcggactgtgctggatgcttgcagtgcccacattaggaatagcaattgtgcaccctcattttcctacgtgaaacacttggtaaaactggttctgggaaatctttctgggacagatcagctttcctgtaacagtgaacaaaagcctgatcgaagccaggctattcgagatcgattgcgaggaaaaggattaccaacaggaagaagctctacttctgatgtactagacatacaaaagcctccactctctcatcagacctttcttaacaaagggcttagtaaatctatgggatttctgtccatcaaagatacacaagatgagaattatttcaaggacattttatcagataattctggacgtgaagattctgaaaatacattctccccttaccagttcaaaactagtggcccagaaaaaaaacccatccctggcattgatgtgctttctaagaagaagatctgggcttcatccatggacttgctttgtacagctgacagagacttctcttcaggagagactgccacatatcgtcgttgtcaccctgaggcagtaacagtgcggacttcaactactcctagaaaaaaggaggcaagatactcagatggaagtatagccttggatatctttggccctcagaaaatggatccaatatatcacactcgagaattgcccacctcctcagcaatatcaagtgctttggaccgaatccgagagagacaaaagaaacttcaggttctgagggaagccatgaatgtagaagaaccagttcgaagatacaaaacttatcatggtgatgtctttagtacctccagtgaaagtccatctattatttcctctgaatcagatttcagacaagtgagaagaagtgaagcctcaaagaggtttgaatccagcagtggtctcccaggggtagatgaaaccttaagtcaaggccagtcacagagaccgagcagacaatatgaaacaccctttgaaggcaacttaattaatcaagagatcatgctaaaacggcaagaggaagaactgatgcagctacaagccaaaatggcccttagacagtctcggttgagcctatatccaggagacacaatcaaagcgtccatgcttgacatcaccagggatccgttaagagaaattgccctagaaacagccatgactcaaagaaaactgaggaatttctttggccctgagtttgtgaaaatgacaattgaaccatttatatctttggatttgccacggtctattcttactaagaaagggaagaatgaggataaccgaaggaaagtaaacataatgcttctgaacgggcaaagactggaactgacctgtgataccaaaactatatgtaaagatgtgtttgatatggttgtggcacatattggcttagtagagcatcatttgtttgctttagctaccctcaaagataatgaatatttctttgttgatcctgacttaaaattaaccaaagtggccccagagggatggaaagaagaaccaaagaaaaagaccaaagccactgttaattttactttgtttttcagaattaaattttttatggatgatgttagtctaatacaacatactctgacgtgtcatcagtattaccttcagcttcgaaaagatattttggaggaaaggatgcactgtgatgatgagacttccttattgctggcatccttggctctccaggctgagtatggagattatcaaccagaggttcatggtgtgtcttactttagaatggagcactatttgcccgccagagtgatggagaaacttgatttatcctatatcaaagaagagttacccaaattgcataatacctatgtgggagcttctgaaaaagagacagagttagaatttttaaaggtctgccaaagactgacagaatatggagttcattttcaccgagtgcaccctgagaagaagtcacaaacaggaatattgcttggagtctgttctaaaggtgtccttgtgtttgaagttcacaatggagtgcgcacattggtccttcgctttccatggagggaaaccaagaaaatatctttttctaaaaagaaaatcacattgcaaaatacatcagatggaataaaacatggcttccagacagacaacagtaagatatgccagtacctgctgcacctctgctcttaccagcataagttccagctacagatgagagcaagacagagcaaccaagatgcccaagatattgatgtgctacacaaaagatggagcatagtatcttcaccagaaagggagatcaccttagtgaacctgaaaaaagatgcaaagtatggcttgggatttcaaattattggtggggagaagatgggaagactggacctaggcatatttatcagttcagttgcccctggaggaccagctgacttggatggatgcttgaagccaggagaccgtttgatatctgtgaatagtgtgagtctggagggagtcagccaccatgctgcaattgaaattttgcaaaatgcacctgaagatgtgacacttgttatctctcagccaaaagaaaagatatccaaagtgccttctactcctgtgcatctcaccaatgagatgaaaaactacatgaagaaatcttcctacatgcaagacagtgctatagattcttcttccaaggatcaccactggtcacgtggtaccctgaggcacatctcggagaactcctttgggccatctgggggcctgcgggaaggaagcctgagttctcaagattccaggactgagagtgccagcttgtctcaaagccaggtcaatggtttctttgccagccatttaggtgaccaaacctggcaggaatcacagcatggcagcccttccccatctgtaatatccaaagccaccgagaaagagactttcactgatagtaaccaaagcaaaactaaaaagccaggcatttctgatgtaactgattactcagaccgtggagattcagacatggatgaagccacttactccagcagtcaggatcatcaaacaccaaaacaggaatcttcctcttcagtgaatacatccaacaagatgaattttaaaactttttcttcatcacctcctaagcctggagatatctttgaggttgaactggctaaaaatgataacagcttggggataagtgtcacgggaggtgtgaatacgagtgtcagacatggtggcatttatgtgaaagctgttattccccagggagcagcagagtctgatggtagaattcacaaaggtgatcgcgtcctagctgtcaatggagttagtctagaaggagccacccataagcaagctgtggaaacactgagaaatacaggacaggtggttcatctgttattagaaaagggacaatctccaacatctaaagaacatgtcccggtaaccccacagtgtaccctttcagatcagaatgcccaaggtcaaggcccagaaaaagtgaagaaaacaactcaggtcaaagactacagctttgtcactgaagaaaatacatttgaggtaaaattatttaaaaatagctcaggtctaggattcagtttttctcgagaagataatcttataccggagcaaattaatgccagcatagtaagggttaaaaagctctttcctggacagccagcagcagaaagtggaaaaattgatgtaggagatgttatcttgaaagtgaatggagcctctttgaaaggactatctcagcaggaagtcatatctgctctcaggggaactgctccagaagtattcttgcttctctgcagacctccacctggtgtgctaccggaaattgatactgcgcttttgaccccacttcagtctccagcacaagtacttccaaacagcagtaaagactcttctcagccatcatgtgtggagcaaagcaccagctcagatgaaaatgaaatgtcagacaaaagcaaaaaacagtgcaagtccccatccagaagagacagttacagtgacagcagtgggagtggagaagatgacttagtgacagctccagcaaacatatcaaattcgacctggagttcagctttgcatcagactctaagcaacatggtatcacaggcacagagtcatcatgaagcacccaagagtcaagaagataccatttgtaccatgttttactatcctcagaaaattcccaataaaccagagtttgaggacagtaatccttcccctctaccaccggatatggctcctgggcagagttatcaaccccaatcagaatctgcttcctctagttcgatggataagtatcatatacatcacatttctgaaccaactagacaagaaaactggacacctttgaaaaatgacttggaaaatcaccttgaagactttgaactggaagtagaactcctcattaccctaattaaatcagaaaaaggaagcctgggttttacagtaaccaaaggcaatcagagaattggttgttatgttcatgatgtcatacaggatccagccaaaagtgatggaaggctaaaacctggggaccggctcataaaggttaatgatacagatgttactaatatgactcatacagatgcagttaatctgctccgggctgcatccaaaacagtcagattagttattggacgagttctagaattacccagaataccaatgttgcctcatttgctaccggacataacactaacgtgcaacaaagaggagttgggtttttccttatgtggaggtcatgacagcctttatcaagtggtatatattagtgatattaatccaaggtccgtcgcagccattgagggtaatctccagctattagatgtcatccattatgtgaacggagtcagcacacaaggaatgaccttggaggaagttaacagagcattagacatgtcacttccttcattggtattgaaagcaacaagaaatgatcttccagtggtccccagctcaaagaggtctgctgtttcagctccaaagtcaaccaaaggcaatggttcctacagtgtggggtcttgcagccagcctgccctcactcctaatgattcattctccacggttgctggggaagaaataaatgaaatatcgtaccccaaaggaaaatgttctacttatcagataaagggatcaccaaacttgactctgcccaaagaatcttatatacaagaagatgacatttatgatgattcccaagaagctgaagttatccagtctctgctggatgttgtggatgaggaagcccagaatcttttaaacgaaaataatgcagcaggatactcctgtggtccaggtacattaaagatgaatgggaagttatcagaagagagaacagaagatacagactgcgatggttcacctttacctgagtattttactgaggccaccaaaatgaatggctgtgaagaatattgtgaagaaaaagtaaaaagtgaaagcttaattcagaagccacaagaaaagaagactgatgatgatgaaataacatggggaaatgatgagttgccaatagagagaacaaaccatgaagattctgataaagatcattcctttctgacaaacgatgagctcgctgtactccctgtcgtcaaagtgcttccctctggtaaatacacgggtgccaacttaaaatcagtcattcgagtcctgcggggtttgctagatcaaggaattccttctaaggagctggagaatcttcaagaattaaaacctttggatcagtgtctaattgggcaaactaaggaaaacagaaggaagaacagatataaaaatatacttccctatgatgctacaagagtgcctcttggagatgaaggtggctatatcaatgccagcttcattaagataccagttgggaaagaagagttcgtttacattgcctgccaaggaccactgcctacaactgttggagacttctggcagatgatttgggagcaaaaatccacagtgatagccatgatgactcaagaagtagaaggagaaaaaatcaaatgccagcgctattggcccaacatcctaggcaaaacaacaatggtcagcaacagacttcgactggctcttgtgagaatgcagcagctgaagggctttgtggtgagggcaatgacccttgaagatattcagaccagagaggtgcgccatatttctcatctgaatttcactgcctggccagaccatgatacaccttctcaaccagatgatctgcttacttttatctcctacatgagacacatccacagatcaggcccaatcattacgcactgcagtgctggcattggacgttcagggaccctgatttgcatagatgtggttctgggattaatcagtcaggatcttgattttgacatctctgatttggtgcgctgcatgagactacaaagacacggaatggttcagacagaggatcaatatattttctgctatcaagtcatcctttatgtcctgacacgtcttcaagcagaagaagagcaaaaacagcagcctcagcttctgaagtgacatgaaaagagcctctggatgcatttccatttctctccttaacctccagcagactcctgctctctatccaaaataaagatcacagagcagcaagttcatacaacatgcatgttctcctctatcttagaggggtattcttcttgaaaataaaaaatattgaaatgctgtatttttacagctactttaacctatgataattatttacaaaattttaacactaaccaaacaatgcagatcttagggatgattaaaggcagcatttgatgatagcagacattgttacaaggacatggtgagtctatttttaatgcaccaatcttgtttatagcaaaaatgttttccaatattttaataaagtagttattttataggggatacttgaaaccagtatttaagctttaaatgacagtaatattggcatagaaaaaagtagcaaatgtttactgtatcaatttctaatgtttactatatagaatttcctgtaatatatttatatactttttcatgaaaatggagttatcagttatctgtttgttactgcatcatctgtttgtaatcattatctcactttgtaaataaaaacacaccttaaaacatg

SEQ ID NO: 487 - DNA, 8133 bp, Homo sapiens
cgtccctgcagccctcgcccggcgctccagtagcaggacccggtctcgggaccagccggtaatatgcacgtgtcactagctgaggccctggaggttcggggtggaccacttcaggaggaagaaatatgggctgtattaaatcaaagtgctgaaagtctccaagaattattcagaaaagtaagcctagctgatcctgctgcccttggcttcatcatttctccatggtctctgctgttgctgccatctggtagtgtgtcatttacagatgaaaatatttccaatcaggatcttcgagcattcactgcaccagaggttcttcaaaatcagtcactaacttctctctcagatgttgaaaagatccacatttattctcttggaatgacactgtattggggggctgattatgaagtgcctcagagccaacctattaagcttggagatcatctcaacagcatactgcttggaatgtgtgaggatgttatttacgctcgagtttctgttcggactgtgctggatgcttgcagtgcccacattaggaatagcaattgtgcaccctcattttcctacgtgaaacacttggtaaaactggttctgggaaatctttctgggacagatcagctttcctgtaacagtgaacaaaagcctgatcgaagccaggctattcgagatcgattgcgaggaaaaggattaccaacaggaagaagctctacttctgatgtactagacatacaaaagcctccactctctcatcagacctttcttaacaaagggcttagtaaatctatgggatttctgtccatcaaagatacacaagatgagaattatttcaaggacattttatcagataattctggacgtgaagattctgaaaatacattctccccttaccagttcaaaactagtggcccagaaaaaaaacccatccctggcattgatgtgctttctaagaagaagatctgggcttcatccatggacttgctttgtacagctgacagagacttctcttcaggagagactgccacatatcgtcgttgtcaccctgaggcagtaacagtgcggacttcaactactcctagaaaaaaggaggcaagatactcagatggaagtatagccttggatatctttggccctcagaaaatggatccaatatatcacactcgagaattgcccacctcctcagcaatatcaagtgctttggaccgaatccgagagagacaaaagaaacttcaggttctgagggaagccatgaatgtagaagaaccagttcgaagatacaaaacttatcatggtgatgtctttagtacctccagtgaaagtccatctattatttcctctgaatcagatttcagacaagtgagaagaagtgaagcctcaaagaggtttgaatccagcagtggtctcccaggggtagatgaaaccttaagtcaaggccagtcacagagaccgagcagacaatatgaaacaccctttgaaggcaacttaattaatcaagagatcatgctaaaacggcaagaggaagaactgatgcagctacaagccaaaatggcccttagacagtctcggttgagcctatatccaggagacacaatcaaagcgtccatgcttgacatcaccagggatccgttaagagaaattgccctagaaacagccatgactcaaagaaaactgaggaatttctttggccctgagtttgtgaaaatgacaattgaaccatttatatctttggatttgccacggtctattcttactaagaaagggaagaatgaggataaccgaaggaaagtaaacataatgcttctgaacgggcaaagactggaactgacctgtgataccaaaactatatgtaaagatgtgtttgatatggttgtggcacatattggcttagtagagcatcatttgtttgctttagctaccctcaaagataatgaatatttctttgttgatcctgacttaaaattaaccaaagtggccccagagggatggaaagaagaaccaaagaaaaagaccaaagccactgttaattttactttgtttttcagaattaaattttttatggatgatgttagtctaatacaacatactctgacgtgtcatcagtattaccttcagcttcgaaaagatattttggaggaaaggatgcactgtgatgatgagacttccttattgctggcatccttggctctccaggctgagtatggagattatcaaccagaggttcatggtgtgtcttactttagaatggagcactatttgcccgccagagtgatggagaaacttgatttatcctatatcaaagaagagttacccaaattgcataatacctatgtgggagcttctgaaaaagagacagagttagaatttttaaaggtctgccaaagactgacagaatatggagttcattttcaccgagtgcaccctgagaagaagtcacaaacaggaatattgcttggagtctgttctaaaggtgtccttgtgtttgaagttcacaatggagtgcgcacattggtccttcgctttccatggagggaaaccaagaaaatatctttttctaaaaagaaaatcacattgcaaaatacatcagatggaataaaacatggcttccagacagacaacagtaagatatgccagtacctgctgcacctctgctcttaccagcataagttccagctacagatgagagcaagacagagcaaccaagatgcccaagatattgagagagcttcgtttaggagcctgaatctccaagcagagtctgttagaggatttaatatgggacgagcaatcagcactggcagtctggccagcagcaccctcaacaaacttgctgttcgacctttatcagttcaagctgagattctgaagaggctatcctgctcagagctgtcgctttaccagccattgcaaaacagttcaaaagagaagaatgacaaagcttcatgggaggaaaagcctagagagatgagtaaatcataccatgatctcagtcaggcctctctctatccacatcggaaaaatgtcattgttaacatggaacccccaccacaaaccgttgcagagttggtgggaaaaccttctcaccagatgtcaagatctgatgcagaatctttggcaggagtgacaaaacttaataattcaaagtctgttgcgagtttaaatagaagtcctgaaaggaggaaacatgaatcagactcctcatccattgaagaccctgggcaagcatatgttctaggaatgactatgcatagttctggaaactcttcatcccaagtacccttaaaagaaaatgatgtgctacacaaaagatggagcatagtatcttcaccagaaagggagatcaccttagtgaacctgaaaaaagatgcaaagtatggcttgggatttcaaattattggtggggagaagatgggaagactggacctaggcatatttatcagttcagttgcccctggaggaccagctgacttggatggatgcttgaagccaggagaccgtttgatatctgtgaatagtgtgagtctggagggagtcagccaccatgctgcaattgaaattttgcaaaatgcacctgaagatgtgacacttgttatctctcagccaaaagaaaagatatccaaagtgccttctactcctgtgcatctcaccaatgagatgaaaaactacatgaagaaatcttcctacatgcaagacagtgctatagattcttcttccaaggatcaccactggtcacgtggtaccctgaggcacatctcggagaactcctttgggccgtctgggggcctgcgggaaggaagcctgagttctcaagattccaggactgagagtgccagcttgtctcaaagccaggtcaatggtttctttgccagccatttaggtgaccaaacctggcaggaatcacagcatggcagcccttccccatctgtaatatccaaagccaccgagaaagagactttcactgatagtaaccaaagcaaaactaaaaagccaggcatttctgatgtaactgattactcagaccgtggagattcagacatggatgaagccacttactccagcagtcaggatcatcaaacaccaaaacaggaatcttcctcttcagtgaatacatccaacaagatgaattttaaaactttttcttcatcacctcctaagcctggagatatctttgaggttgaactggctaaaaatgataacagcttggggataagtgtcacggtactgtttgacaagggaggtgtgaatacgagtgtcagacatggtggcatttatgtgaaagctgttattccccagggagcagcagagtctgatggtagaattcacaaaggtgatcgcgtcctagctgtcaatggagttagtctagaaggagccacccataagcaagctgtggaaacactgagaaatacaggacaggtggttcatctgttattagaaaagggacaatctccaacatctaaagaacatgtcccggtaaccccacagtgtaccctttcagatcagaatgcccaaggtcaaggcccagaaaaagtgaagaaaacaactcaggtcaaagactacagctttgtcactgaagaaaatacatttgaggtaaaattatttaaaaatagctcaggtctaggattcagtttttctcgagaagataatcttataccggagcaaattaatgccagcatagtaagggttaaaaagctctttcctggacagccagcagcagaaagtggaaaaattgatgtaggagatgttatcttgaaagtgaatggagcctctttgaaaggactatctcagcaggaagtcatatctgctctcaggggaactgctccagaagtattcttgcttctctgcagacctccacctggtgtgctaccggaaattgatactgcgcttttgaccccacttcagtctccagcacaagtacttccaaacagcagtaaagactcttctcagccatcatgtgtggagcaaagcaccagctcagatgaaaatgaaatgtcagacaaaagcaaaaaacagtgcaagtccccatccagaagagacagttacagtgacagcagtgggagtggagaagatgacttagtgacagctccagcaaacatatcaaattcgacctggagttcagctttgcatcagactctaagcaacatggtatcacaggcacagagtcatcatgaagcacccaagagtcaagaagataccatttgtaccatgttttactatcctcagaaaattcccaataaaccagagtttgaggacagtaatccttcccctctaccaccggatatggctcctgggcagagttatcaaccccaatcagaatctgcttcctctagttcgatggataagtatcatatacatcacatttctgaaccaactagacaagaaaactggacacctttgaaaaatgacttggaaaatcaccttgaagactttgaactggaagtagaactcctcattaccctaattaaatcagaaaaaggaagcctgggttttacagtaaccaaaggcaatcagagaattggttgttatgttcatgatgtcatacaggatccagccaaaagtgatggaaggctaaaacctggggaccggctcataaaggttaatgatacagatgttactaatatgactcatacagatgcagttaatctgctccgggctgcatccaaaacagtcagattagttattggacgagttctagaattacccagaataccaatgttgcctcatttgctaccggacataacactaacgtgcaacaaagaggagttgggtttttccttatgtggaggtcatgacagcctttatcaagtggtatatattagtgatattaatccaaggtccgtcgcagccattgagggtaatctccagctattagatgtcatccattatgtgaacggagtcagcacacaaggaatgaccttggaggaagttaacagagcattagacatgtcacttccttcattggtattgaaagcaacaagaaatgatcttccagtggtccccagctcaaagaggtctgctgtttcagctccaaagtcaaccaaaggcaatggttcctacagtgtggggtcttgcagccagcctgccctcactcctaatgattcattctccacggttgctggggaagaaataaatgaaatatcgtaccccaaaggaaaatgttctacttatcagataaagggatcaccaaacttgactctgcccaaagaatcttatatacaagaagatgacatttatgatgattcccaagaagctgaagttatccagtctctgctggatgttgtggatgaggaagcccagaatcttttaaacgaaaataatgcagcaggatactcctgtggtccaggtacattaaagatgaatgggaagttatcagaagagagaacagaagatacagactgcgatggttcacctttacctgagtattttactgaggccaccaaaatgaatggctgtgaagaatattgtgaagaaaaagtaaaaagtgaaagcttaattcagaagccacaagaaaagaagactgatgatgatgaaataacatggggaaatgatgagttgccaatagagagaacaaaccatgaagattctgataaagatcattcctttctgacaaacgatgagctcgctgtactccctgtcgtcaaagtgcttccctctggtaaatacacgggtgccaacttaaaatcagtcattcgagtcctgcggggtttgctagatcaaggaattccttctaaggagctggagaatcttcaagaattaaaacctttggatcagtgtctaattgggcaaactaaggaaaacagaaggaagaacagatataaaaatatacttccctatgatgctacaagagtgcctcttggagatgaaggtggctatatcaatgccagcttcattaagataccagttgggaaagaagagttcgtttacattgcctgccaaggaccactgcctacaactgttggagacttctggcagatgatttgggagcaaaaatccacagtgatagccatgatgactcaagaagtagaaggagaaaaaatcaaatgccagcgctattggcccaacatcctaggcaaaacaacaatggtcagcaacagacttcgactggctcttgtgagaatgcagcagctgaagggctttgtggtgagggcaatgacccttgaagatattcagaccagagaggtgcgccatatttctcatctgaatttcactgcctggccagaccatgatacaccttctcaaccagatgatctgcttacttttatctcctacatgagacacatccacagatcaggcccaatcattacgcactgcagtgctggcattggacgttcagggaccctgatttgcatagatgtggttctgggattaatcagtcaggatcttgattttgacatctctgatttggtgcgctgcatgagactacaaagacacggaatggttcagacagaggatcaatatattttctgctatcaagtcatcctttatgtcctgacacgtcttcaagcagaagaagagcaaaaacagcagcctcagcttctgaagtgacatgaaaagagcctctggatgcatttccatttctctccttaacctccagcagactcctgctctctatccaaaataagatcacagagcagcaagttcatacaacatgcatgttctcctctatcttagaggggtattcttcttgaaaataaaaaatattgaaatgctgtatttttacagctactttaacctatgataattatttacaaaattttaacactaaccaaacaatgcagatcttagggatgattaaaggcagcatttgatgatagcagacattgttacaaggacatggtgagtctatttttaatgcaccaatcttgtttatagcaaaaatgttttccaatattttaataaagtagttattttataggggatacttgaaaccagtatttaagctttaaatgacagtaatattggcatagaaaaaagtagcaaatgtttactgtatcaatttctaatgtttactatatagaatttcctgtaatatatttatatactttttcatgaaaatggagttatcagttatctgtttgttactgcatcatctgtttgtaatcattatctcactttgtaaataaaaacacaccttaaaacatg

SEQ ID NO: 488 - DNA, 8062 bp, Homo sapiens
cgtccctgcagccctcgcccggcgctccagtagcaggacccggtctcgggaccagccggtaatatgcacgtgtcactagctgaggccctggaggttcggggtggaccacttcaggaggaagaaatatgggctgtattaaatcaaagtgctgaaagtctccaagaattattcagaaaagtaagcctagctgatcctgctgcccttggcttcatcatttctccatggtctctgctgttgctgccatctggtagtgtgtcatttacagatgaaaatatttccaatcaggatcttcgagcattcactgcaccagaggttcttcaaaatcagtcactaacttctctctcagatgttgaaaagatccacatttattctcttggaatgacactgtattggggggctgattatgaagtgcctcagagccaacctattaagcttggagatcatctcaacagcatactgcttggaatgtgtgaggatgttatttacgctcgagtttctgttcggactgtgctggatgcttgcagtgcccacattaggaatagcaattgtgcaccctcattttcctacgtgaaacacttggtaaaactggttctgggaaatctttctgggacagatcagctttcctgtaacagtgaacaaaagcctgatcgaagccaggctattcgagatcgattgcgaggaaaaggattaccaacaggaagaagctctacttctgatgtactagacatacaaaagcctccactctctcatcagacctttcttaacaaagggcttagtaaatctatgggatttctgtccatcaaagatacacaagatgagaattatttcaaggacattttatcagataattctggacgtgaagattctgaaaatacattctccccttaccagttcaaaactagtggcccagaaaaaaaacccatccctggcattgatgtgctttctaagaagaagatctgggcttcatccatggacttgctttgtacagctgacagagacttctcttcaggagagactgccacatatcgtcgttgtcaccctgaggcagtaacagtgcggacttcaactactcctagaaaaaaggaggcaagatactcagatggaagtatagccttggatatctttggccctcagaaaatggatccaatatatcacactcgagaattgcccacctcctcagcaatatcaagtgctttggaccgaatccgagagagacaaaagaaacttcaggttctgagggaagccatgaatgtagaagaaccagttcgaagatacaaaacttatcatggtgatgtctttagtacctccagtgaaagtccatctattatttcctctgaatcagatttcagacaagtgagaagaagtgaagcctcaaagaggtttgaatccagcagtggtctcccaggggtagatgaaaccttaagtcaaggccagtcacagagaccgagcagacaatatgaaacaccctttgaaggcaacttaattaatcaagagatcatgctaaaacggcaagaggaagaactgatgcagctacaagccaaaatggcccttagacagtctcggttgagcctatatccaggagacacaatcaaagcgtccatgcttgacatcaccagggatccgttaagagaaattgccctagaaacagccatgactcaaagaaaactgaggaatttctttggccctgagtttgtgaaaatgacaattgaaccatttatatctttggatttgccacggtctattcttactaagaaagggaagaatgaggataaccgaaggaaagtaaacataatgcttctgaacgggcaaagactggaactgacctgtgataccaaaactatatgtaaagatgtgtttgatatggttgtggcacatattggcttagtagagcatcatttgtttgctttagctaccctcaaagataatgaatatttctttgttgatcctgacttaaaattaaccaaagtggccccagagggatggaaagaagaaccaaagaaaaagaccaaagccactgttaattttactttgtttttcagaattaaattttttatggatgatgttagtctaatacaacatactctgacgtgtcatcagtattaccttcagcttcgaaaagatattttggaggaaaggatgcactgtgatgatgagacttccttattgctggcatccttggctctccaggctgagtatggagattatcaaccagaggttcatggtgtgtcttactttagaatggagcactatttgcccgccagagtgatggagaaacttgatttatcctatatcaaagaagagttacccaaattgcataatacctatgtgggagcttctgaaaaagagacagagttagaatttttaaaggtctgccaaagactgacagaatatggagttcattttcaccgagtgcaccctgagaagaagtcacaaacaggaatattgcttggagtctgttctaaaggtgtccttgtgtttgaagttcacaatggagtgcgcacattggtccttcgctttccatggagggaaaccaagaaaatatctttttctaaaaagaaaatcacattgcaaaatacatcagatggaataaaacatggcttccagacagacaacagtaagatatgccagtacctgctgcacctctgctcttaccagcataagttccagctacagatgagagcaagacagagcaaccaagatgcccaagatattgagagagcttcgtttaggagcctgaatctccaagcagagtctgttagaggatttaatatgggacgagcaatcagcactggcagtctggccagcagcaccctcaacaaacttgctgttcgacctttatcagttcaagctgagattctgaagaggctatcctgctcagagctgtcgctttaccagccattgcaaaacagttcaaaagagaagaatgacaaagcttcatgggaggaaaagcctagagagatgagtaaatcataccatgatctcagtcaggcctctctctatccacatcggaaaaatgtcattgttaacatggaacccccaccacaaaccgttgcagagttggtgggaaaaccttctcaccagatgtcaagatctgatgcagaatctttggcaggagtgacaaaacttaataattcaaagtctgttgcgagtttaaatagaagtcctgaaaggaggaaacatgaatcagactcctcatccattgaagaccctgggcaagcatatgttctagatgtgctacacaaaagatggagcatagtatcttcaccagaaagggagatcaccttagtgaacctgaaaaaagatgcaaagtatggcttgggatttcaaattattggtggggagaagatgggaagactggacctaggcatatttatcagttcagttgcccctggaggaccagctgacttggatggatgcttgaagccaggagaccgtttgatatctgtgaatagtgtgagtctggagggagtcagccaccatgctgcaattgaaattttgcaaaatgcacctgaagatgtgacacttgttatctctcagccaaaagaaaagatatccaaagtgccttctactcctgtgcatctcaccaatgagatgaaaaactacatgaagaaatcttcctacatgcaagacagtgctatagattcttcttccaaggatcaccactggtcacgtggtaccctgaggcacatctcggagaactcctttgggccatctgggggcctgcgggaaggaagcctgagttctcaagattccaggactgagagtgccagcttgtctcaaagccaggtcaatggtttctttgccagccatttaggtgaccaaacctggcaggaatcacagcatggcagcccttccccatctgtaatatccaaagccaccgagaaagagactttcactgatagtaaccaaagcaaaactaaaaagccaggcatttctgatgtaactgattactcagaccgtggagattcagacatggatgaagccacttactccagcagtcaggatcatcaaacaccaaaacaggaatcttcctcttcagtgaatacatccaacaagatgaattttaaaactttttcttcatcacctcctaagcctggagatatctttgaggttgaactggctaaaaatgataacagcttggggataagtgtcacgggaggtgtgaatacgagtgtcagacatggtggcatttatgtgaaagctgttattccccagggagcagcagagtctgatggtagaattcacaaaggtgatcgcgtcctagctgtcaatggagttagtctagaaggagccacccataagcaagctgtggaaacactgagaaatacaggacaggtggttcatctgttattagaaaagggacaatctccaacatctaaagaacatgtcccggtaaccccacagtgtaccctttcagatcagaatgcccaaggtcaaggcccagaaaaagtgaagaaaacaactcaggtcaaagactacagctttgtcactgaagaaaatacatttgaggtaaaattatttaaaaatagctcaggtctaggattcagtttttctcgagaagataatcttataccggagcaaattaatgccagcatagtaagggttaaaaagctctttcctggacagccagcagcagaaagtggaaaaattgatgtaggagatgttatcttgaaagtgaatggagcctctttgaaaggactatctcagcaggaagtcatatctgctctcaggggaactgctccagaagtattcttgcttctctgcagacctccacctggtgtgctaccggaaattgatactgcgcttttgaccccacttcagtctccagcacaagtacttccaaacagcagtaaagactcttctcagccatcatgtgtggagcaaagcaccagctcagatgaaaatgaaatgtcagacaaaagcaaaaaacagtgcaagtccccatccagaagagacagttacagtgacagcagtgggagtggagaagatgacttagtgacagctccagcaaacatatcaaattcgacctggagttcagctttgcatcagactctaagcaacatggtatcacaggcacagagtcatcatgaagcacccaagagtcaagaagataccatttgtaccatgttttactatcctcagaaaattcccaataaaccagagtttgaggacagtaatccttcccctctaccaccggatatggctcctgggcagagttatcaaccccaatcagaatctgcttcctctagttcgatggataagtatcatatacatcacatttctgaaccaactagacaagaaaactggacacctttgaaaaatgacttggaaaatcaccttgaagactttgaactggaagtagaactcctcattaccctaattaaatcagaaaaaggaagcctgggttttacagtaaccaaaggcaatcagagaattggttgttatgttcatgatgtcatacaggatccagccaaaagtgatggaaggctaaaacctggggaccggctcataaaggttaatgatacagatgttactaatatgactcatacagatgcagttaatctgctccgggctgcatccaaaacagtcagattagttattggacgagttctagaattacccagaataccaatgttgcctcatttgctaccggacataacactaacgtgcaacaaagaggagttgggtttttccttatgtggaggtcatgacagcctttatcaagtggtatatattagtgatattaatccaaggtccgtcgcagccattgagggtaatctccagctattagatgtcatccattatgtgaacggagtcagcacacaaggaatgaccttggaggaagttaacagagcattagacatgtcacttccttcattggtattgaaagcaacaagaaatgatcttccagtggtccccagctcaaagaggtctgctgtttcagctccaaagtcaaccaaaggcaatggttcctacagtgtggggtcttgcagccagcctgccctcactcctaatgattcattctccacggttgctggggaagaaataaatgaaatatcgtaccccaaaggaaaatgttctacttatcagataaagggatcaccaaacttgactctgcccaaagaatcttatatacaagaagatgacatttatgatgattcccaagaagctgaagttatccagtctctgctggatgttgtggatgaggaagcccagaatcttttaaacgaaaataatgcagcaggatactcctgtggtccaggtacattaaagatgaatgggaagttatcagaagagagaacagaagatacagactgcgatggttcacctttacctgagtattttactgaggccaccaaaatgaatggctgtgaagaatattgtgaagaaaaagtaaaaagtgaaagcttaattcagaagccacaagaaaagaagactgatgatgatgaaataacatggggaaatgatgagttgccaatagagagaacaaaccatgaagattctgataaagatcattcctttctgacaaacgatgagctcgctgtactccctgtcgtcaaagtgcttccctctggtaaatacacgggtgccaacttaaaatcagtcattcgagtcctgcggggtttgctagatcaaggaattccttctaaggagctggagaatcttcaagaattaaaacctttggatcagtgtctaattgggcaaactaaggaaaacagaaggaagaacagatataaaaatatacttccctatgatgctacaagagtgcctcttggagatgaaggtggctatatcaatgccagcttcattaagataccagttgggaaagaagagttcgtttacattgcctgccaaggaccactgcctacaactgttggagacttctggcagatgatttgggagcaaaaatccacagtgatagccatgatgactcaagaagtagaaggagaaaaaatcaaatgccagcgctattggcccaacatcctaggcaaaacaacaatggtcagcaacagacttcgactggctcttgtgagaatgcagcagctgaagggctttgtggtgagggcaatgacccttgaagatattcagaccagagaggtgcgccatatttctcatctgaatttcactgcctggccagaccatgatacaccttctcaaccagatgatctgcttacttttatctcctacatgagacacatccacagatcaggcccaatcattacgcactgcagtgctggcattggacgttcagggaccctgatttgcatagatgtggttctgggattaatcagtcaggatcttgattttgacatctctgatttggtgcgctgcatgagactacaaagacacggaatggttcagacagaggatcaatatattttctgctatcaagtcatcctttatgtcctgacacgtcttcaagcagaagaagagcaaaaacagcagcctcagcttctgaagtgacatgaaaagagcctctggatgcatttccatttctctccttaacctccagcagactcctgctctctatccaaaataaagatcacagagcagcaagttcatacaacatgcatgttctcctctatcttagaggggtattcttcttgaaaataaaaaatattgaaatgctgtatttttacagctactttaacctatgataattatttacaaaattttaacactaaccaaacaatgcagatcttagggatgattaaaggcagcatttgatgatagcagacattgttacaaggacatggtgagtctatttttaatgcaccaatcttgtttatagcaaaaatgttttccaatattttaataaagtagttattttataggggatacttgaaaccagtatttaagctttaaatgacagtaatattggcatagaaaaaagtagcaaatgtttactgtatcaatttctaatgtttactatatagaatttcctgtaatatatttatatactttttcatgaaaatggagttatcagttatctgtttgttactgcatcatctgtttgtaatcattatctcactttgtaaataaaaacacaccttaaaacatg

SEQ ID NO: 489 - DNA, 5787 bp, Homo sapiens
atgttacttcctgtatggaggcatggccagtttccagcgccgcgctcttcgttccttcccagcctgcgccggagccacaactttcaggagcatggactgaaggcgccctcgccccagcgcccctctgagatcctttgtgttttcctccgtttcctccggccgtttctattttggggggctctccgctccccctgcctctcccctccccttcccctctcgcaaacatgcctccttccttcccggggccctggaaggagctgcctgcctgaagcccggagacgccgcgccgcgctcagccccgccgccgcccgccggctctcgggctgtgctgcgctgccgactcaagttggggatcctcggctgctcgccgccgccgcccgcggtccctgtctgccccaggcccggggcatcgccgccggccgccgactccgcgccctgcccgatcggctctctcctttttaaacggaaagcagcctttctccgccgagaggatcgtccccagcgtggctctgcgttcccggtcactttttgagattttccggggggcgctcggcggcttcccggattccaaggggactcgggccgccgagcgcggggggcccgtggagcgggcgagccggggaagcgccccggcttagcggaggctcgcacggaggcaagaacttattcaacaagtttacctccctgctttcctcttttcgatgtgcgttttcggacatgcggaggttactggaaccgtgttggtggattttgttcctgaaaatcaccagttccgtgctccattatgtcgtgtgcttccccgcgttgacagaaggctacgttggggccctgcacgagaatagacacggcagcgcagtgcagatccgcaggcgcaaggcttcaggcgacccgtactgggcctactctggtgcctatggtcctgagcactgggtcacgtctagtgtcagctgtgggagccgtcaccagtctcctattgacattttagaccagtatgcgcgtgttggggaagaataccaggaactgcaactcgatggcttcgacaatgagtcttctaacaaaacctggatgaaaaacacagggaaaacagtcgccatccttctgaaagacgactattttgtcagtggagctggtctacctggcagattcaaagctgagaaggtggaatttcactggggccacagcaatggctcagcgggctctgaacacagcatcaatggcaggaggtttcctgttgagatgcagattttcttttacaatccagatgactttgacagctttcaaaccgcaatttctgagaacagaataatcggagccatggccatattttttcaagtcagtccgagggacaattctgcactggatcctattatccacgggttgaagggtgtcgtacatcatgagaaggagacctttctggatcctttcgtcctccgggacctcctgcctgcatccctgggcagctattatcggtacacaggttccttgaccacaccaccgtgtagcgaaatagtggagtggatagtcttccggagacccgtccccatctcttaccatcagcttgaggctttttattccatcttcaccacggagcagcaagaccatgtcaagtcggtggagtatctgagaaataactttcgaccacagcagcgtctgcatgacagggtggtgtccaagtccgccgtccgtgactcctggaaccacgacatgacagacttcttagaaaacccactggggacagaagcctctaaagtttgcagctctccacccatccacatgaaggtgcagcctctgaaccagacggcactgcaggtgtcctggagccagccggagactatctaccacccacccatcatgaactacatgatctcctacagctggaccaagaatgaggacgagaaggagaagacgtttacaaaggacagcgacaaagacttgaaagccaccattagccatgtctcacccgatagcctttacctgttccgagtccaggccgtgtgtcggaacgacatgcgcagcgactttagccagacgatgctgtttcaagctaataccactcgaatattccaagggaccagaatagtgaaaacaggagtgcccacagcgtctcctgcctcttcagccgacatggcccccatcagctcggggtcttctacctggacgtcctctggcatcccattctcatttgtttccatggcaactgggatgggcccctcctccagtggcagccaggccacagtggcctcggtggtcaccagcacgctgctcgccggcctggggttcggcggtggtggcatctcctctttccccagcactgtgtggcccacgcgcctcccgacggccgcctcagccagcaagcaggcggctaggccagtcctagccaccacagaggccttggcttctccagggcccgatggtgattcgtcaccaaccaaggacggcgagggcaccgaggaaggagagaaggatgagaaaagcgagagtgaggatggggagcgggagcacgaggaggatggagagaaggactccgaaaagaaggagaagagtggggtgacccacgctgccgaggagcggaatcagacggagcccagccccacaccctcgtctcctaacaggactgccgagggagggcatcagactatacctgggcatgagcaggatcacactgccgtccccacagaccagacgggcggaaggagggatgccggcccaggcctggaccccgacatggtcacctccacccaagtgccccccaccgccacagaggagcagtatgcagggagtgatcccaagaggcccgaaatgccatctaaaaagcctatgtcccgcggggaccgattttctgaagacagcagatttatcactgttaatccagcggaaaaaaacacctctggaatgataagccgccctgctccagggaggatggagtggatcatccctctgattgtggtatcagccttgaccttcgtgtgcctcatccttctcattgctgtgctcgtttactggagagggtgtaacaaaataaagtccaagggctttcccagacgtttccgtgaagtgccttcttctggggagagaggagagaaggggagcagaaaatgttttcagactgctcatttctatgtggaagacagcagttcacctcgagtggtccctaatgaaagtattcctattattcctattccggatgacatggaagccattcctgtcaaacagtttgtcaaacacatcggtgagctctattctaataaccagcatgggttctctgaggattttgaggaagtccagcgctgtactgctgatatgaacatcactgcagagcattccaatcatccagaaaacaagcacaaaaacagatacatcaacattttagcatatgatcacagtagggtgaagttaagacctttaccaggaaaagactctaagcacagcgactacattaatgcaaactatgttgatggttacaacaaagcaaaagcctacattgccacccaaggacctttgaagtctacatttgaagatttctggaggatgatttgggaacaaaacactggaatcattgtgatgattacgaaccttgtggaaaaaggaagacgaaaatgtgatcagtattggccaacagagaacagtgaggaatatggaaacattattgtcacgctgaagagcacaaaaatacatgcctgctacactgttcgtcgtttttcaatcagaaatacaaaagtgaaaaagggtcagaagggaaatcccaagggtcgtcagaatgaaagggtagtgatccagtatcactatacacagtggcctgacatgggagttcccgagtatgcccttccagtactgactttcgtgaggagatcctcagcagctcggatgccagaaacgggccctgtgttggtgcactgcagtgctggtgtgggcagaacaggcacctatattgtaatagacagcatgctgcaacagataaaagacaaaagcacagttaacgtcctgggattcctgaagcatatcaggacacagcgtaactacctcgtccagactgaggagcagtacattttcatccatgatgccttgttggaagccattcttggaaaggagactgaagtatcttcaaatcagctgcacagctatgttaacagcatccttataccaggagtaggaggaaagacacgactggaaaagcaattcaagctggtcacacagtgtaatgcaaaatatgtggaatgtttcagtgctcagaaagagtgtaacaaagaaaagaacagaaactcttcagttgtgccatctgagcgtgctcgagtgggtcttgcaccattgcctggaatgaaaggaacagattacattaatgcttcttatatcatgggctattataggagcaatgaatttattataactcagcatcctctgccacatactacgaaagatttctggcgaatgatttgggatcataacgcacagatcattgtcatgctgccagacaaccagagcttggcagaagatgagtttgtgtactggccaagtcgagaagaatccatgaactgtgaggcctttaccgtcacccttatcagcaaagacagactgtgcctctctaatgaagaacaaattatcatccatgactttatccttgaagctacacaggatgactatgtcttagaagttcggcactttcagtgtcccaaatggcctaacccagatgcccccataagtagtacctttgaacttatcaacgtcatcaaggaagaggccttaacaagggatggtcccaccattgttcatgatgagtatggagcagtttcagcaggaatgttatgtgcccttaccaccctgtcccagcaactggagaatgaaaatgctgtggatgttttccaggttgcaaaaatgatcaatcttatgaggcctggagtattcacagacattgaacaataccagttcatctataaagcaaggcttagcttggtcagcactaaagaaaatggaaatggtcccatgacagtagacaaaaatggtgctgttcttattgcagatgaatcagaccctgctgagagcatggagtccctagtgtgactggaatcctgaaagggcacttaatttgtaaacttctgaagactgagaacttttttgaggccttttttgccagactctaggttatacaataacccagttacttttttacactgataaaagttttgatatttattttttgccattttatgtcttaatggtatcctactgagcatttgcacctctgttcatttcacacagtgaaacgcaattttacctagtttgcactatatgatcagtgttactgcctataatcttatacaacagcaaaccctgatgtgacattccatgacgacatacatgctacttttttttagttcaatacagtgaaggtctttgttatgacagtgaatattgcttttattattattattgctgaagtggttgcattctactagcaggcaatgctgtacttttcttcagtcctcctctcctttttattttaggcactgttcaatactgtatgccttctgtattttaatggagtggatagcattgttttcttttacagactagcaggctactgggacctaaaaaggtctgttaatgtcatggccttgaaacagttccatttatgctggttaagagatcccttaagaagttagaaggcttaagaactgcttcatgtgaacatcccttattagttacaaagttatattcacagttttttaaaaatgtgtcaaaataaaggataactctgtattacagctttcccagtaaaaaaaaaaaaaaaaa

SEQ ID NO: 490 - DNA, 3037 bp, Homo sapiens
atgaggggagtcgagactcccgcgccccaccacccccggcggagctgctgctgagccactcaatctgagccctggctactaataaagttcgtttaaaaatcataatcattcttaagagagcgaaagagggtgcgaactagccgctcggccccgcagggagagctggcgcgtcgggaggagacagcggcggcagcggttgcgccgcgaccaggaggagccggtggcgccgggcggcgggtccgcggccggtgggggacggtgagtagcggctcgcgctgcggtgcagcggcgctgcactcactcgccctctccaggggctgggggttcgtccggctccactggggaagactcagcttctccccggggtcccgggttgtgccttactctccggagtgggcaggggtatcgagggcaggggcctcccggcccggctcccccatcccccggttcggaccgccgagcgccggctctcccctccctgagcaccgatcccaagttccagctagagaaggtgggcggcagcgccagcccggcgccccctcccagctcccagcgatttgagagggaagatctgatctcctagaattagagttggtacagaaaccatttcagctccaaaaatgttggaggaagatatggaagtcgccataaagatggtggttgtagggaatggagcagttggaaaatcaagtatgattcagcgatattgcaaaggcatttttacaaaagactacaagaaaaccattggagttgattttttggagcgacaaattcaagttaatgatgaagatgtcagactaatgttatgggacactgcaggtcaggaggaatttgatgcaattacaaaggcctactatcgaggagcccaggcttgtgtgctcgtgttctctaccacagatagggaatcttttgaagcagtttccagttggagagagaaagtagtagccgaagtgggagatataccaactgtacttgtgcaaaacaagattgatcttctggatgattcttgtataaagaatgaggaagctgaggcactggcaaaaaggttaaagttaagattctacagaacatcagtgaaagaagatctaaatgtgaatgaagtttttaagtatttggctgaaaaataccttcagaaactcaaacaacaaatagctgaggatccagaactaacgcattcaagtagtaacaagattggtgtctttaatacatctggtggaagtcactccggtcagaattcaggtaccctcaatggtggagatgtcatcaatcttagacccaacaaacaaaggaccaagaaaaacagaaatccttttagcagctgtagcataccctaagatgttttgggaggaaaacaattgaattacattgtgcaatgcattaagaaacccatccagctgtcatggtatgttacaaggttttcagcagactttgctcctaatggctctctgaaagtgacagacttaaatattgctctgcagtgcttttcagaatgtagagtgagacctctggtggaaaaattattgccctgtggactcctttaattttttttacattagacgaagcttctcctgtttgtaaaggaatgctataagaaatttcaaacacaggttttgcggaattttaaatgctggaaaacataaatgaaatgcctaaatatattgttacagattttaatactgtggatcaaggaaagatagcaagcattcttttcctgaaattggtcatgtagcttttctgcgaaatagtattgaatctgaatactttcacaaaataatactgaaaggtaaaccctaaatcttgccagactgcattagtattttggcattgaaacttgtgcaatatctgtgtaatgtagaatgtggggtgtgcatgcagatgtctggtactggagtaagctgaaggtatgtgcagtatttaagaaaatgtacattctaattaattcacttataaaaccatttacatattgtgtatatgtttttattttcaaatgataaactctagacatatattttgcaaaatgagcttgggtttaaaaagtgctttgtgccaaaaatatcatacctaatttttatagtgctttactatcagaatttatattgtttattatatcttttaaaagcagtaagcagttttcatctgacagcgtagataaaagaggagtataggaatttgaatgctagagcatctcccaggtgagccttattgcagatctttttgatatagtcacccataagcatggtgagctcctgctctcataaggtcagccaaagccccttaagaaggtacacagcacatctgcagtcattcaggaggtcctgtgaagtgtggtgatgcatctaacaccttttgctgctcactgagaacccagctttgaacttacaagattacactaaccatttttaaagtgcacaaaaatattattattagtcttaactaaaattacatattttataatgccctgcaactctaaaccatccttttgtttacacatttttgtatggtattttaagattatcaatcacttcaacatttctataaccttgtttgtatagcactttctcaagagctgtcagtcccacatacagaatcatttcttttacaaaatgatttaatatgtaatcatgtgtcaggacataaattttgtcacttgggacagtagctttccagctaagataattgcgtgaactctgttaaaactgattatcactcatcaatggctttatttttaacctataaataacccctttcaatatacctggtttttacagcattgcaaaatctgtaaaaataacttttattggaaaatgtcatgaagtcatttttcattatttgtactaaacaatgttttatgtactccttttgtgttttatcttttgtttttccatctgtactcccctcatcctcctaatgttgagaaaatcaaatttcctgggtgtgtccttgttaagtgatcaaaagtaaatgttctctttgccattttagatggaaaaataaaaaaaattaaaaagtaaaaaaaaaaaaaaaaaaaaaaaaaaaa

SEQ ID NO: 491 - DNA, 3969 bp, Homo sapiens
ggcccagaaatagcagcggcgcgttcccctcggcgcagagcgacgggcagaggcgagagacgccgcggggccgggcggcggccccggaaggatgctgctgagccccggcactgcctggctgcgagcacatgatggcgatacgggagctcaaagtgtgccttctcggggacactggggttgggaaatcaagcatcgtgtgtcgatttgtccaggatcactttgaccacaacatcagccctactattggggcatcttttatgaccaaaactgtgccttgtggaaatgaacttcacaagttcctcatctgggacactgctggtcaggaacggtttcattcattggctcccatgtactatcgaggctcagctgcagctgttatcgtgtatgatattaccaagcaggattcattttataccttgaagaaatgggtcaaggagctgaaagaacatggtccagaaaacattgtaatggccatcgctggaaacaagtgcgacctctcagatattagggaggttcccctgaaggatgctaaggaatacgctgaatccataggtgccatcgtggttgagacaagtgcaaaaaatgctattaatatcgaagagctctttcaaggaatcagccgccagatcccacccttggacccccatgaaaatggaaacaatggaacaatcaaagttgagaagccaaccatgcaagccagccgccggtgctgttgacccaagggccgtggtccacggtacttgaagaagccagagcccacatcctgtgcactgctgaaggaccctacgctcggtggcctggcacctcactttgagaagagtgagcacactggctttgcatcctggaagacctgcagggggcggggcaggaaatgtacctgaaaaggattttagaaaaccctgggaaaacccaccacaccaccacaaaatggcctttagtgtatgaaatgcacatggaggggatgtagttgcatttttgctaaaaaaaaaaaaaaacctttaaaaattgttggatgtgtacaaaagtcttactgccttattatgtgtatgggattctaaagtggcattccacttggatttcctgtgctacctatcccaaattcccagtaactacttcagtgtcattgcctttgttacctaaccaaccttcactgaaaggcaaatttagttcaggaggttagtttttagctagctttggaagtaagcctttatttattactttttggaggaaatcagagaagtgtcaatggaccgtcactcagactgagacttgagttattacagaagccaggaaaagtgtattagaaactgttgtctacaccacttttaattggtgaacaatttttctaagttatggtcatatatacccaaacaaaccaaatcaaactaaattactgcatataattttgggattgggtggcctagtttgaaagagtgatttaagtaatcactatgtaagtggtgagagatgcaggacatacacattattcaagagaccacctgacatgcatctcctccgcaggaatacattcgtcctctcttagagaagtttaacgcacatagtattattttactaagagaatatctcttggtgtcatatctaggggaagagaattaactagaattaaatttaatgtttgaatctaaatcattgggcaaacttctaataataacaattaataataggttacaggaaagccagccagaggaagtgtcagcactttaaaattctagaccccaaaaaactacaaaatcagaaaaagtatttttatgtttctagcttgaggagaagggctttagggctaaccagaggtctgaccctagaatgccaaggaactgagaatgggctccgatgaaaaccttccttttcagattccctgtctgctcaattaaagatgtttgaatccaaaggaagtcaaggaagaaaaagcatggaaaggaagagaactgattcctactgaaaattcaaattctattaccattctaactttcataaaaagttgggatcaagaagcagctgatttcctgccagggcttatattagggggtgattcttaaaggacattaggattggtgctcagaaatggttaatcatgctgtgtgctagccagggccagctggtaccttctttgccatgagcattcaagggacagctaacctttattgacaatctatattgcaaaagtcaggaaagaggttgtgagctgattggattaaagacctggcacttcagtaactcagcacgcttccacttcactcaacttaagagagttcattgacagtgttaggatgtgaaggctgggaaacacttattttgcttcaagagttccacttggctctcccaaataggtacctcaaaaactgttagcaagcggcatttggatgtcttgacaggggctttgcagggatttttagggttttttccacattgtccacattaatggttggcatgattgtgcttgcaggccaagaaatgatcataccccttgccaaaggtaaaaaaaaaaaaaaaaaaatgagttgaaaattgaagtgacctctttccagctgacttgcaggcttattttgtaacctttcctcatccagttttccctgagaacctgggtttatctctagatagctgttcaggttttttagctgaggggtaagtatcctagctgagagttttgcatctttgggctgggtttgcagtggttgtgttttgcataaaatgtctagtctttgccacagatagtgagctacccactaatgagcccatggttttatttcagaagcacatgagggtgtgaaaccactctgttacctttctgtattgtcttagctattcaagccagtcagaggataatatatatattctcatcagcactcagagtagtcagtgaagagagtaggatcacacttggggcacaccaggattcacataaacattgtatcttctctgtggatgctcaggccttgtctacaatgaggctttacaaccttccttgtttggctcgggattacttcctggctgtctaataattgaaccataaccatgtaatattatgtaaaggcctggaaattactgttgctaaaaaaagtcatgtagtttcatgtagtgtagcatccttggcatcgttttccaaaatttgttccttctcccttttttttttctttcgtgtgtggcatgagtgtgtatctgtgtaaatatgattgtatatgtgttactccgatatgtaatccatttcactggctgagtttggcccctagccatgtgttaatataaagtagggcatgggcttcccaatggaaatctctgagaatgacagtggagttgtgcaagcattttacattgccacataattgacttgccattttatggttaaaaacgggcacattaggcagttgaatatgacgttaccttgcagactaaaaggttgaaggcccgaaactaacttttagctaacaataagggctgtgccccaatggaaactgagttcattttctgagaaaggtttggatgactgaaatatttcctctacagtcaaggactttggcatgcggtggctgaaactgagcttttttgtgtgggctccagttctcactgttctgcaatgctcatggcaagttgaatggtgagctagcttataaattaaagagctctgaactgtattcagaccgactgggtatctagcttactgttttaacatcattgttgaaaccagaccctgtagtccagtggtgctgccctgttgtgcaaactgctcctttttctcgtgtttttgtaaagagcttccatctgggctggacccagttcttgcacatacaagacaccgctgcagtcagctaggacctttccgccatgtattctattctgtagtaaagcatttccatcaacaatgcctaattgtatctgttatttttggtttaacacacactgattcatactaataaatattttcagttttaaaaaaaaaaaaaaaaaaaaaaa

SEQ ID NO: 492 - DNA, 1740 bp, Homo sapiens
acagcgttggcggagcccgagcggagtgggactcgaggccctgtagccggactgggcccctcgccccctcctccagcggcctgcgggccttggcagcgccgcccctgcccacactgaccccgtgtggcggggccgctccgcgcccccgggccgctctgtaatggtagggcagcctcagccccgagatgacgtcgggtctccgcggccccgggttattgtaggaaccatccggccccgcgtaatcgtaggaactatccggccccgcgtaatcgtagggtctgcgcgggcccggcccccaccagacgggactccccgcccccaattggcggccgaagagtctcctcgccccagagtcatcttcgggacgcccagggcccgggtgattttgggctcgccgcggccccgggtgattgtttcatctccgtggcccgcggtggtcgtagcgtctccgagaccgcggactcccgtagggtccccgtggccccgagttgtagtcgggacaccccggccgcgggtgatcgtcgggtctccacgcgcccgggtcgctgacgcggatccggcctcggcgccttctcagggcgccctgcaaggccgcaggcaggatgaacattctggcacccgtgcggagggatcgcgtcctggcggagctgccccagtgcctgaggaaggaggccgctttgcacgggcacaaagacttccacccccgcgtcacctgcgcctgccaggagcaccggacaggcaccgtgggatttaagatctccaagatcattgtggtgggggacctgtcggtggggaagacttgcctcattaataggttctgcaaagacacctttgataagaattacaaggccaccattggagtggacttcgagatggaacgatttgaggtgctgggcattcccttcagtttgcagctttgggataccgctgggcaggagaggttcaaatgcattgcatcaacctactatagaggagctcaagccatcatcattgtcttcaacctgaatgatgtggcatctctggaacataccaagcagtggctggccgatgccctgaaggagaatgacccttccagtgtgcttctcttccttgtaggttccaagaaggatctgagtacccctgctcagtatgcgctgatggagaaagacgccctccaggtggcccaggagatgaaggctgagtactgggcagtctcatctctcactggtgagaatgtccgagaattcttcttccgtgtggcagcactgacctttgaggccaatgtgctggctgagctggagaaatcgggggctcgacgcattggggatgttgtccgcatcaacagtgatgacagcaacctctacctaactgccagcaagaagaagcccacatgttgcccatgagggctgaggagactgttcagagactgcccagccctagggcactgtgccaccctcattcctccagagcttgacccctggacatttgcactgactttatccagaccaaagagctgcctcttggtggcagtattcccacagaggggtagctgggatcatgctagtcacttcctgcccccaggcaccgtgccaaagactggatgccccctactcctcaggggactgtccagggcgcccagtggtagtgagggagagtgtctctgttcttttgctcagcctgctgggccctttgtgtttgaggatgcttaatgattccagcctctcactgtgccttatgcattaaaatttctttgttacgagc

SEQ ID NO: 493 - DNA, 1412 bp, Homo sapiens
ggctgcgcttccctggtcaggcacggcacgtctggccggccgccaggatgcaggccccgcacaaggagcacctgtacaagttgctggtgattggcgacctgggcgtggggaagaccagtatcatcaagcgctacgtgcaccagaacttctcctcgcactaccgggccacaatcggcgtggacttcgcgctcaaggtgctccactgggacccggagactgtggtgcgcctgcagctctgggatatcgcaggtcaagaaagatttggaaacatgacgagggtctattaccgagaagctatgggtgcatttattgtcttcgatgtcaccaggccagccacatttgaagcagtggcaaagtggaaaaatgatttggactccaagttaagtctccctaatggcaaaccggtttcagtggttttgttggccaacaaatgtgaccaggggaaggatgtgctcatgaacaatggcctcaagatggaccagttctgcaaggagcacggtttcgtaggatggtttgaaacatcagcaaaggaaaatataaacattgatgaagcctccagatgcctggtgaaacacatacttgcaaatgagtgtgacctaatggagtctattgagccggacgtcgtgaagccccatctcacatcaaccaaggttgccagctgctctggctgtgccaaatcctagtaggcacctttgctggtgtctggtaggaatgacctcattgttccacaaattgtgcctctatttttaccattttgggtaaacgtcaggatagatataccacatgtggcaagccaaagatctatgcctctgttttttcaatgagagagaaatagcaaatgttctttctatgctttcctcaccatcatcacagtgtttacaaacttttgaaaatatttagtctgttacaaacttctgtcatgtagctgaccaaaatcctgcagggccacagtcggcactgttatttgcttcttttaatcagcaaaggcctcaagtcttaaaataaaaggggagaagaacaaactagctgtcaagtcaaggactggctttcaccttgccctggtgtctttttccagatttcaatatattctctgatggcctgacaggcctattaagtagatgtgatattttcttccaagatgacctccattctcggcagacctaagagttgcctctgagttagctctttggaatcgtgaacacaggtgtgctatattgtccttgtcctaactgtcacttgccatggcctgaatgttggcttaactgaatattgtatgaaaagacatgcctccatatgtgcctttctgttagctctctttgactcaagctgtggggctcctctatacatgctatacatgtaatatatattatatatatttttgcaagtgaacaataaaacattaaaagataaaa

SEQ ID NO: 494 - DNA, 8839 bp, Homo sapiens
ctaagcaagcctgggcaatggcgggcgtccctcccccagcctcgttgccgccttgcagtttgatctcagactgctgtgctagcaatcagcgagattccgtgggcgtaggaccctctgagccaggtgtgggatatagtctcgtggtgcgccgtttcttaagccggtctgaaaagcgcaatattcggatgggagtgacccgattttccaggaactgaagttaaaagatgaagaatgtgagaggctttcaaaagtgcgagatcaacttggacaggaattggaagaactcacagctagtctatttgaggaagctcataaaatggtgagagaagcaaatatcaagcaggcaacagcagaaaaacagctaaaagaagcacaaggaaaaattgatgtacttcaagctgaagtagctgcattgaagacacttgtattgtccagttctccaacatcacctacgcaggagcctttgccaggtggaaagacaccttttaaaaaggggcatacaagaaataaaagcacaagcagtgctatgagtggcagtcatcaggacctcagtgtgatacagccaattgtaaaagactgcaaagaggctgacttatccttgtataatgaattccgattgtggaaggatgagcccacaatggacaggacgtgtcctttcttagacaaaatctaccaggaagatatctttccatgtttaacattctcaaaaagtgagttggcttcagctgttctggaggctgtggaaaacaatactctaagcattgaaccagtgggattacaacctatccggtttgtgaaagcttctgcagttgaatgcggaggaccaaaaaaatgtgctctcactggccagagtaagtcctgtaaacacagaattaaattaggggactcaagcaactattattatatttctcctttttgcagatacaggatcacttctgtatgtaacttttttacatacattcgatacattcagcagggactcgtgaaacagcaggatgttgatcagatgttttgggaggttatgcagttgagaaaagagatgtcattggcaaagctgggttatttcaaagaggaactctgatgctctgcgtgggaccatgcctgaactccccgaataactgaaaaatggctgaatatttttatggttacttgatatttatttccaaggagtgagcctaagacttttttccccttttgcaaattgctctaagaagtaccatgatttcttttaaactgatctatgctgtgtttgcttattctttagttgaacacactatgaagaattccaggtgtactagtgaatgtaatttatagttgccaaaaaaaaaaaaaacctgaaataaataaatgttagattgaatgtgtgtacattttctcttctagctctgacatggcatttagggttagcagaatgtattaaatagtaattttcaaactacacagtagcttccttccttgtgagaggcaagaaagaagtctgagtggatagtactcactttccaaggcccccacctctagaatggctttatttttatctgttttctatattgggtttcaaaaaagattttatttgaagaaatacttctgctgctacaaagtttgaaagttactattttaattattctgctctctgtaactgaaagaatccctttattttggttattcattaaaatataatagaaggcagtcagattttatcccagagatgtattcctgagtgtcttgatatagtgtattcatgttttatatgtgttgaccactatattgtcattggagggacatagatgtaaatgagtttgacgtgtgtcaaaggggtttaaaggggtgtggattgaatgaatggtacgtgcgaagtatatgctgattatagaaccacttgatctctgcattccaaattgtaaaactgactcaactggagaaattataacaaagaggtttgtggtagacatgtaataagtatagaaaagcaaaaagaaaagagaaactgctttagtttctgtttagagaaagctgctgttaatatttttggatagtagcctttcagctttcagatattttctacttacatatgcatatttttgaaacaaaaagtaggctttttttttgctttttaaacctaaacattaaatatattttcccttgggtaaacctacacatcctaatccctgtttatagaattttaacataatttaattgtgtttggagatgaggtggttttcagtttatttttcatattataatgctgtgacgagtatccttatctgtacacttctgaacattgtggagttctttcatgtggatgcctggagataaaattgtgtcgagatatatatgtatttttaaatgtttgatctgcattgctagattgccatccagaaaagttaatcaatttgtattcacagcagcagtgtacaagagggctggttttctgaagataacatttttttcagtcctgttcagaggtttggtcaatcttacctgtagatgacttcagccaccaggctggatgggagcccacagacaaaaggacattggtgtatgttatggtgaaaaccatcagtaccatgcctagctcaagaatgtgaaattgaacctgaaaaaaactttgaacctacaattttatgttctgaaaatagttattctaatgtgagggcattaataagaatatgtaccatcaaagcttcagaagattttccgtacaaactaaaatcacttttggagaaagtacctaaataaaaagagaaacaaatccaggagatactgtacggtttgaaagaaaggtaatcaaatactcagaaaaagtttgttgatgacttaaaaaggataaataaaaagtaagactaaagaaaatcagtatacccattaataataaatctttagtaatctataaggggaagaatgcttttcaaccttatacactagaagcatgctctttaaaattaatgcaacaggatgacgacttgatgtagaaactatatgtggaattatagattaaaatgtgattgaaacatatttagaaaatgtgattatcttcctgatcctactccctttaggaagaacttcttaaactggaagcaggaaaaaaaaaaaccataaaagataaccataaaagaatataagttatggtatattataaattcttaatttagaaatcgtgcatcagtagttaggcattgtggctcatgcctgtaatcccagcactttgggaggcagaggcagaaggattacttgagctgcttgagcccaggagtttgagacgggcctgggaaaaatagggaaactccatttacacacacacacacacacacacacacacacacactgtgtccatgaacttgggaggatgaggtgggaggattgcttgagcccaggggttcaagtccaacttgggcaacatagggagaccttgtctctaaaaaaaaaactaaagctaaactacaaactgtgaggcaatatctgcaacatttataactagtaatagcttagtatcaagaatgtatgcagaaattctacaaaccaacaaaaaaggacagtgtcacagaaaaacaggcaaaagactgaaccaggccttccacacaattagaagtgcatgtgggccaataaacattaagaggttttcatctctcaatcaggaaaacgtaaatcaagatgacaatgacatgttcaaattcattcgattggtgaaaatgaagaaacacaaagtcaagttttggagagggttttagtcattaggatcactcacatattgctgatgggggtatcaattggtatatccactgtgaaaaaccattcactagaaaagttgggccaggcccagtggctcatgcctcttggctttgggaggccaaggtaggaggatcacttgagcccaagagttcaagaccagcttgagcaacatagggagaccacatctgcacaaaaagatttttttgaattagctgggcatggtggtgcatgcctgtggtcccagctacttgggaagctgaggtggaaggattgcttaagcccaggaggttgaggctgcagtgaatcatgattgtgccactgcactcttaccttgggtgacagagtaagatcataccttaaaaaaaaaaaaaaagtatacccatgggtcagcaatttcacttttcagtatatacttgagaaatgcttgcacaggtcccccagatcacacatataagaatgttctggaataaattaaaatgtctatttttaggaaggtgtaatgtgttcacagaatgggtgattattacatggcagcaaaatgaatgaataccagctacttgcagcacaataactcagaatgaaaaagcaattctgagaaaactatatgtgacatgatacttttcttataaaagtcaagaacaactaaaactgaacagctgtttaggcattgacatatgtgacaaaacttttaaaaagtaataaagttcaagatagtggttacctctggagaggtagaggaggagcaaatctatgagtaagtcactggtaatgttttagtccctgggttaggtggtgggttttggggtggttcatttgtcattaaaagtaagtacatgagctgggtgtagtggtgcgtgcttatagtcccagctacttgggagtctgagataggaagatccttgaggccagttcaaggctatagtgtgctatgatttcacctgtgaatagctactatattccaacctgggcaacgtagaccttgcccccctttaaaaaaattcaaaaacaaaataaatgcatggacaaatgaataagagagttatgcatggaacatcggtggtgtattatgaatcaagcattattactagctcagttatatgtgccttcattccaaaacaaaaaataaaaggtaagaaaattgttgaattgcatttgagagagaggaaaggaaagaattcaggtctgaatcttaggcttttggcttgagctattgcagtttattgagatggggaaatacatggtggggaaagtttgggtatgtgcataacagagacagaaattcagtgtttgacagatcaagtgtgaggtgcccactgagcatcaaagtggatatgttaagcaggtattggatgtacaaatctaaattcagtaaggtcagtccaggagaaaatttggggagtagttagccatgggatcagatgggcgctttagggacactttggagatgaagtacagcactgagccctgagttcctgtgacagagaagcagcctgcaaagacgaaaggaggagctgttaggaagagcaaggcaacagaaaaggaagaaccagcatgctgattatgttcaggagagtgtttctacgctgaatttaattgccaagattaccaattctaaagaagaggaggactcttggacaagtttttagaagttggtttggagctggggtgagagcctggcctaatggagacagctctggattgggagtcacttagacctacattctggtctaggtttggctcccaaaaactgggaaggttagttaggtggccactcctctctcttcatggtctctctcagcttgaagacaatttacagtctttgactaagcatccacactggaagaacaagatttggtttctgaacattgggtcttagtccttaaaataacttgcaacctgttacgtcttcacttactcccatcgccaccacaagaatcctgtgtgtttttgttttgtgcatccagtctaaaacgggtctgcttttattcataggcttttgttttcagtggtttttgttgttgcatttttccctagataaaatgttttttctataagacactgcttaaaagagtccaatgcagtatgaatttgtatttgtgtttaacttttgtgcttaacagatctgccatggctgaactctcagttgcttaagcaaaattctggggcttattctaggttcctttatttgtcattgtcactcccattccagttatcagcaaattccatcagctgtctccgagacatcttaaatctgtctacctccctccatgtccactgctaccactctgcccaagctattatcatctttcacctgaactcctgcactaatgtctgctgtccttgcatccactcctgccctcctacaatcactgacggcagccgcagggatctttataaaacgaaaatcagataatgtcacttccctgcttaaagccctttgagtggcttcccattgcacttagaaaaaaaaaaaaaaaaaaaaactggccaggtgcgatggctcatgcctgtaatcccagcactttgggaggccgaggcgggcggatcccctgaggttggtagttcgagacctgcttggccaacatggagaaaccctgtctctactaaaaacacaaaattagtcaggtgtgatggcgcatgcctgtaatcccagctacttgggaggctgagtcaggagaaacgctcgaacccaggaggcagaggttgtggtgagttgacatcacgccattgcactccagcctgggcaacaagagtgaaactccgtctgaaaaaaaaaaaaaaaaacccaaactcaatagaaaatcaagttttcatagtggtagttgttaacagagaaataacaatgaaagctttaaaaaactccatgaaaatttgcaaaacttaaaaaaaaaatgtagaagaggactaaacttgataaaatattaaaagaattgaaacccttcctaaaggcagcttctcaagggagcacaagttcacacacagtttacttttggaggaacgtctgaggtcatgaggactagattctagagctacaggtctcagggacagtctcgagggatacagggcccccatcaccacatccccagatttaaccgcagcagctcagcttttatctgtatctgttggagctctctaggaaatgtcaataccaaagcaaacccaaatcacaactagattagattactattcaagagaatgattctctaccgaaactctgcaaaatggggatatcaagagagttggaaaatgtaagacgtaaagaccataatcaggaaaatacgcatcatatttgttattcactgagagggaggaatttccacttaaatcctatttccagcagctggattgtgctctcagtggagtgctctggattctgattaatagagattttctagtcctcccagcaacttccttctcaattctcttcactttccgcagatctcggcaccagggttgcatcttgtgggctccattgtgttttcacacaatgtgctatttgtccttcacagtgttttggtttatttttctgtttgtccatcttgtttttgaacaattgccagcatttaaaaatgaggaaatctaaaatctgcatttcaagctgctcttttttaaaatgtgccgtttcgacaacactgagcccacagtcttgaatgacaacacttgggtggagctgagtgactccacctgtcgggtggctacacccttgctcagggtatgcactccatggtttgctctatggcccaccatcctggattgtctccctgacaccaaggctaagggacccactttactcacttatctgctgggccttggaagtatttcagttcggaaccccaattctaaccttagcttctcaggccattaaatgaaatctcatttctatgatgcttcctgtcacatcactgtgctgctgagaacatgaagtctgtgggtgaattggtggacgggatccagaatcattacttggcagtggattatagtgtgatgactcatttccggtggtctccaggagacttggctgggagcttctcttggagtctagggttagccagaggctacatgttttaggcatcttaattcatattttatctaaaggcatataaatccttaaaaaaaatcatttgacttcatccttgctccctacatccagccagtaaccattgctttgttttacatcgcgtgcttcaggctttactacagcctacctggattttgcagtagcttcttaaactgcttaaactttggatattgccccagccaacacattctgccacagagatctctctgagttaaatgggattgtatcatgccccacacccaagcagatagaaactgtcaatagatacacttagaatgaatatgcatggaatcaaattacattcagaatctaccactataggtagtgaatacaacaggatagcagaggctgggaagggtaatgggggttggggggtgggaggataaaggggttgggtaatgggtgtaaaaatctatagaaggaatatgatctgttgtttggtagcacaatagggtaaatacagttaataatttattgtatatttcacaataaaggagtggatttggaatgttctcaacacaaatgataaatgtttgaggtgatggataccccaattaccctgatttgatcattatacgttgtatgtttgtatcaaaatatcatatgtaccccataaatatgtacaactattatgtatccataaaaattggaaataaactaccaccatctttcttcagcctattttcctatctcctctcgcaccatactaggcacacaatctctgtacctgtgctgtcttccaagccattgctcatgttttaagaaatatacttattgtttaatatatcctgtaccactgtaggatgactgtagttaacaataatgtgtagtttcaaatagctaatagctggaaggaagttgttgaatgtttccaacataaagaaatgataagtgtttgagatgatggatatgctaattaccctgatctgatcactacacattatatgtatggaaatatcattgtgtaccccatgaatatgggcaattattatttgttaattaaaaaaataaaaaaaagacccacccactgtttaa

SEQ ID NO: 495 - DNA, 9347 bp, Homo sapiens
gcttccggcgcaggcgcagtcccgcgttccctcggcggctgccggcgtagtgagcccgccgccgtggagtgtagcggaaagggctcgccgtcctcctccgtttctcgctgcttcgggacgcgctctctgcggctctgtgagcgcccctgagcgccggcagcggccgcggtgggttcttcaggttatcttatgatgaggcttttgctatggctaatgatcccttggaaggcttccatgaagtaaaccttgcttcacctacttctccggaccttcttggtgtgtatgaatcaggaactcaagagcagactacctcaccaagtgtcatctaccggccacacccttcagctttatcctctgtacctatccaggcaaatgcattagatgtttctgaacttcctacacaacccgtgtattcatcccccagacgtttaaattgtgcggaaatatctagtatcagctttcatgttacagacccagccccttgctctacctctggagtcacagctggattaactaaattaactacaagaaaggacaactataatgcagagagagagtttttacagggtgctactataacagaggcttgcgatggcagtgatgatatttttgggttgagtactgatagtctgtctcgtttacgaagcccatctgttttggaagttagagaaaagggctatgaacgattaaaagaagaactcgcaaaagctcagagggaactgaagttaaaagatgaagaatgtgagaggctttcaaaagtgcgagatcaacttggacaggaattggaagaactcacagctagtctatttgaggaagctcataaaatggtgagagaagcaaatatcaagcaggcaacagcagaaaaacagctaaaagaagcacaaggaaaaattgatgtacttcaagctgaagtagctgcattgaagacacttgtattgtccagttctccaacatcacctacgcaggagcctttgccaggtggaaagacaccttttaaaaaggggcatacaagaaataaaagcacaagcagtgctatgagtggcagtcatcaggacctcagtgtgatacagccaattgtaaaagactgcaaagaggctgacttatccttgtataatgaattccgattgtggaaggatgagcccacaatggacaggacgtgtcctttcttagacaaaatctaccaggaagatatctttccatgtttaacattctcaaaaagtgagttggcttcagctgttctggaggctgtggaaaacaatactctaagcattgaaccagtgggattacaacctatccggtttgtgaaagcttctgcagttgaatgcggaggaccaaaaaaatgtgctctcactggccagagtaagtcctgtaaacacagaattaaattaggggactcaagcaactattattatatttctcctttttgcagatacaggatcacttctgtatgtaacttttttacatacattcgatacattcagcagggactcgtgaaacagcaggatgttgatcagatgttttgggaggttatgcagttgagaaaagagatgtcattggcaaagctgggttatttcaaagaggaactctgatgctctgcgtgggaccatgcctgaactccccgaataactgaaaaatggctgaatatttttatggttacttgatatttatttccaaggagtgagcctaagacttttttccccttttgcaaattgctctaagaagtaccatgatttcttttaaactgatctatgctgtgtttgcttattctttagttgaacacactatgaagaattccaggtgtactagtgaatgtaatttatagttgccaaaaaaaaaaaaaacctgaaataaataaatgttagattgaatgtgtgtacattttctcttctagctctgacatggcatttagggttagcagaatgtattaaatagtaattttcaaactacacagtagcttccttccttgtgagaggcaagaaagaagtctgagtggatagtactcactttccaaggcccccacctctagaatggctttatttttatctgttttctatattgggtttcaaaaaagattttatttgaagaaatacttctgctgctacaaagtttgaaagttactattttaattattctgctctctgtaactgaaagaatccctttattttggttattcattaaaatataatagaaggcagtcagattttatcccagagatgtattcctgagtgtcttgatatagtgtattcatgttttatatgtgttgaccactatattgtcattggagggacatagatgtaaatgagtttgacgtgtgtcaaaggggtttaaaggggtgtggattgaatgaatggtacgtgcgaagtatatgctgattatagaaccacttgatctctgcattccaaattgtaaaactgactcaactggagaaattataacaaagaggtttgtggtagacatgtaataagtatagaaaagcaaaaagaaaagagaaactgctttagtttctgtttagagaaagctgctgttaatatttttggatagtagcctttcagctttcagatattttctacttacatatgcatatttttgaaacaaaaagtaggctttttttttgctttttaaacctaaacattaaatatattttcccttgggtaaacctacacatcctaatccctgtttatagaattttaacataatttaattgtgtttggagatgaggtggttttcagtttatttttcatattataatgctgtgacgagtatccttatctgtacacttctgaacattgtggagttctttcatgtggatgcctggagataaaattgtgtcgagatatatatgtatttttaaatgtttgatctgcattgctagattgccatccagaaaagttaatcaatttgtattcacagcagcagtgtacaagagggctggttttctgaagataacatttttttcagtcctgttcagaggtttggtcaatcttacctgtagatgacttcagccaccaggctggatgggagcccacagacaaaaggacattggtgtatgttatggtgaaaaccatcagtaccatgcctagctcaagaatgtgaaattgaacctgaaaaaaactttgaacctacaattttatgttctgaaaatagttattctaatgtgagggcattaataagaatatgtaccatcaaagcttcagaagattttccgtacaaactaaaatcacttttggagaaagtacctaaataaaaagagaaacaaatccaggagatactgtacggtttgaaagaaaggtaatcaaatactcagaaaaagtttgttgatgacttaaaaaggataaataaaaagtaagactaaagaaaatcagtatacccattaataataaatctttagtaatctataaggggaagaatgcttttcaaccttatacactagaagcatgctctttaaaattaatgcaacaggatgacgacttgatgtagaaactatatgtggaattatagattaaaatgtgattgaaacatatttagaaaatgtgattatcttcctgatcctactccctttaggaagaacttcttaaactggaagcaggaaaaaaaaaaaccataaaagataaccataaaagaatataagttatggtatattataaattcttaatttagaaatcgtgcatcagtagttaggcattgtggctcatgcctgtaatcccagcactttgggaggcagaggcagaaggattacttgagctgcttgagcccaggagtttgagacgggcctgggaaaaatagggaaactccatttacacacacacacacacacacacacacacacacactgtgtccatgaacttgggaggatgaggtgggaggattgcttgagcccaggggttcaagtccaacttgggcaacatagggagaccttgtctctaaaaaaaaaactaaagctaaactacaaactgtgaggcaatatctgcaacatttataactagtaatagcttagtatcaagaatgtatgcagaaattctacaaaccaacaaaaaaggacagtgtcacagaaaaacaggcaaaagactgaaccaggccttccacacaattagaagtgcatgtgggccaataaacattaagaggttttcatctctcaatcaggaaaacgtaaatcaagatgacaatgacatgttcaaattcattcgattggtgaaaatgaagaaacacaaagtcaagttttggagagggttttagtcattaggatcactcacatattgctgatgggggtatcaattggtatatccactgtgaaaaaccattcactagaaaagttgggccaggcccagtggctcatgcctcttggctttgggaggccaaggtaggaggatcacttgagcccaagagttcaagaccagcttgagcaacatagggagaccacatctgcacaaaaagatttttttgaattagctgggcatggtggtgcatgcctgtggtcccagctacttgggaagctgaggtggaaggattgcttaagcccaggaggttgaggctgcagtgaatcatgattgtgccactgcactcttaccttgggtgacagagtaagatcataccttaaaaaaaaaaaaaaagtatacccatgggtcagcaatttcacttttcagtatatacttgagaaatgcttgcacaggtcccccagatcacacatataagaatgttctggaataaattaaaatgtctatttttaggaaggtgtaatgtgttcacagaatgggtgattattacatggcagcaaaatgaatgaataccagctacttgcagcacaataactcagaatgaaaaagcaattctgagaaaactatatgtgacatgatacttttcttataaaagtcaagaacaactaaaactgaacagctgtttaggcattgacatatgtgacaaaacttttaaaaagtaataaagttcaagatagtggttacctctggagaggtagaggaggagcaaatctatgagtaagtcactggtaatgttttagtccctgggttaggtggtgggttttggggtggttcatttgtcattaaaagtaagtacatgagctgggtgtagtggtgcgtgcttatagtcccagctacttgggagtctgagataggaagatccttgaggccagttcaaggctatagtgtgctatgatttcacctgtgaatagctactatattccaacctgggcaacgtagaccttgcccccctttaaaaaaattcaaaaacaaaataaatgcatggacaaatgaataagagagttatgcatggaacatcggtggtgtattatgaatcaagcattattactagctcagttatatgtgccttcattccaaaacaaaaaataaaaggtaagaaaattgttgaattgcatttgagagagaggaaaggaaagaattcaggtctgaatcttaggcttttggcttgagctattgcagtttattgagatggggaaatacatggtggggaaagtttgggtatgtgcataacagagacagaaattcagtgtttgacagatcaagtgtgaggtgcccactgagcatcaaagtggatatgttaagcaggtattggatgtacaaatctaaattcagtaaggtcagtccaggagaaaatttggggagtagttagccatgggatcagatgggcgctttagggacactttggagatgaagtacagcactgagccctgagttcctgtgacagagaagcagcctgcaaagacgaaaggaggagctgttaggaagagcaaggcaacagaaaaggaagaaccagcatgctgattatgttcaggagagtgtttctacgctgaatttaattgccaagattaccaattctaaagaagaggaggactcttggacaagtttttagaagttggtttggagctggggtgagagcctggcctaatggagacagctctggattgggagtcacttagacctacattctggtctaggtttggctcccaaaaactgggaaggttagttaggtggccactcctctctcttcatggtctctctcagcttgaagacaatttacagtctttgactaagcatccacactggaagaacaagatttggtttctgaacattgggtcttagtccttaaaataacttgcaacctgttacgtcttcacttactcccatcgccaccacaagaatcctgtgtgtttttgttttgtgcatccagtctaaaacgggtctgcttttattcataggcttttgttttcagtggtttttgttgttgcatttttccctagataaaatgttttttctataagacactgcttaaaagagtccaatgcagtatgaatttgtatttgtgtttaacttttgtgcttaacagatctgccatggctgaactctcagttgcttaagcaaaattctggggcttattctaggttcctttatttgtcattgtcactcccattccagttatcagcaaattccatcagctgtctccgagacatcttaaatctgtctacctccctccatgtccactgctaccactctgcccaagctattatcatctttcacctgaactcctgcactaatgtctgctgtccttgcatccactcctgccctcctacaatcactgacggcagccgcagggatctttataaaacgaaaatcagataatgtcacttccctgcttaaagccctttgagtggcttcccattgcacttagaaaaaaaaaaaaaaaaaaaaactggccaggtgcgatggctcatgcctgtaatcccagcactttgggaggccgaggcgggcggatcccctgaggttggtagttcgagacctgcttggccaacatggagaaaccctgtctctactaaaaacacaaaattagtcaggtgtgatggcgcatgcctgtaatcccagctacttgggaggctgagtcaggagaaacgctcgaacccaggaggcagaggttgtggtgagttgacatcacgccattgcactccagcctgggcaacaagagtgaaactccgtctgaaaaaaaaaaaaaaaaacccaaactcaatagaaaatcaagttttcatagtggtagttgttaacagagaaataacaatgaaagctttaaaaaactccatgaaaatttgcaaaacttaaaaaaaaaatgtagaagaggactaaacttgataaaatattaaaagaattgaaacccttcctaaaggcagcttctcaagggagcacaagttcacacacagtttacttttggaggaacgtctgaggtcatgaggactagattctagagctacaggtctcagggacagtctcgagggatacagggcccccatcaccacatccccagatttaaccgcagcagctcagcttttatctgtatctgttggagctctctaggaaatgtcaataccaaagcaaacccaaatcacaactagattagattactattcaagagaatgattctctaccgaaactctgcaaaatggggatatcaagagagttggaaaatgtaagacgtaaagaccataatcaggaaaatacgcatcatatttgttattcactgagagggaggaatttccacttaaatcctatttccagcagctggattgtgctctcagtggagtgctctggattctgattaatagagattttctagtcctcccagcaacttccttctcaattctcttcactttccgcagatctcggcaccagggttgcatcttgtgggctccattgtgttttcacacaatgtgctatttgtccttcacagtgttttggtttatttttctgtttgtccatcttgtttttgaacaattgccagcatttaaaaatgaggaaatctaaaatctgcatttcaagctgctcttttttaaaatgtgccgtttcgacaacactgagcccacagtcttgaatgacaacacttgggtggagctgagtgactccacctgtcgggtggctacacccttgctcagggtatgcactccatggtttgctctatggcccaccatcctggattgtctccctgacaccaaggctaagggacccactttactcacttatctgctgggccttggaagtatttcagttcggaaccccaattctaaccttagcttctcaggccattaaatgaaatctcatttctatgatgcttcctgtcacatcactgtgctgctgagaacatgaagtctgtgggtgaattggtggacgggatccagaatcattacttggcagtggattatagtgtgatgactcatttccggtggtctccaggagacttggctgggagcttctcttggagtctagggttagccagaggctacatgttttaggcatcttaattcatattttatctaaaggcatataaatccttaaaaaaaatcatttgacttcatccttgctccctacatccagccagtaaccattgctttgttttacatcgcgtgcttcaggctttactacagcctacctggattttgcagtagcttcttaaactgcttaaactttggatattgccccagccaacacattctgccacagagatctctctgagttaaatgggattgtatcatgccccacacccaagcagatagaaactgtcaatagatacacttagaatgaatatgcatggaatcaaattacattcagaatctaccactataggtagtgaatacaacaggatagcagaggctgggaagggtaatgggggttggggggtgggaggataaaggggttgggtaatgggtgtaaaaatctatagaaggaatatgatctgttgtttggtagcacaatagggtaaatacagttaataatttattgtatatttcacaataaaggagtggatttggaatgttctcaacacaaatgataaatgtttgaggtgatggataccccaattaccctgatttgatcattatacgttgtatgtttgtatcaaaatatcatatgtaccccataaatatgtacaactattatgtatccataaaaattggaaataaactaccaccatctttcttcagcctattttcctatctcctctcgcaccatactaggcacacaatctctgtacctgtgctgtcttccaagccattgctcatgttttaagaaatatacttattgtttaatatatcctgtaccactgtaggatgactgtagttaacaataatgtgtagtttcaaatagctaatagctggaaggaagttgttgaatgtttccaacataaagaaatgataagtgtttgagatgatggatatgctaattaccctgatctgatcactacacattatatgtatggaaatatcattgtgtaccccatgaatatgggcaattattatttgttaattaaaaaaataaaaaaaagacccacccactgtttaa

SEQ ID NO: 496 - DNA, 9636 bp, Homo sapiens
ggttacctggcggcgggcgggcgcggccgggagcggagggccgcggtcgcgaagaggatgaagagagagttcccgaacaagtcggaagcagctcacaacaccggacgccgcgcggcagggctgtggacctggggtggtttcgtgtcccagtcttaggaaactacgcgcgaggcaccgtgctgaggcgtagaggtcaccctcgggaggtttcggtgaaacctggtgggaaattccgggcaggcgcccggagtcgcgcccaagtaggcagctccgtgccgccagacttgtgttcgggggagttgagacgaactgcacgggtgggattgcatggctctgccctcccagcgttgacaactcgccccgaccgcccaggaagcgcgagcttactggctccagaagtgatgatgctgggtggaagtcgcagcatgtgaagagttgccggttgttatgggattaaaaaagatgaaagggttatcttatgatgaggcttttgctatggctaatgatcccttggaaggcttccatgaagtaaaccttgcttcacctacttctccggaccttcttggtgtgtatgaatcaggaactcaagagcagactacctcaccaagtgtcatctaccggccacacccttcagctttatcctctgtacctatccaggcaaatgcattagatgtttctgaacttcctacacaacccgtgtattcatcccccagacgtttaaattgtgcggaaatatctagtatcagctttcatgttacagacccagccccttgctctacctctggagtcacagctggattaactaaattaactacaagaaaggacaactataatgcagagagagagtttttacagggtgctactataacagaggcttgcgatggcagtgatgatatttttgggttgagtactgatagtctgtctcgtttacgaagcccatctgttttggaagttagagaaaagggctatgaacgattaaaagaagaactcgcaaaagctcagagggaactgaagttaaaagatgaagaatgtgagaggctttcaaaagtgcgagatcaacttggacaggaattggaagaactcacagctagtctatttgaggaagctcataaaatggtgagagaagcaaatatcaagcaggcaacagcagaaaaacagctaaaagaagcacaaggaaaaattgatgtacttcaagctgaagtagctgcattgaagacacttgtattgtccagttctccaacatcacctacgcaggagcctttgccaggtggaaagacaccttttaaaaaggggcatacaagaaataaaagcacaagcagtgctatgagtggcagtcatcaggacctcagtgtgatacagccaattgtaaaagactgcaaagaggctgacttatccttgtataatgaattccgattgtggaaggatgagcccacaatggacaggacgtgtcctttcttagacaaaatctaccaggaagatatctttccatgtttaacattctcaaaaagtgagttggcttcagctgttctggaggctgtggaaaacaatactctaagcattgaaccagtgggattacaacctatccggtttgtgaaagcttctgcagttgaatgcggaggaccaaaaaaatgtgctctcactggccagagtaagtcctgtaaacacagaattaaattaggggactcaagcaactattattatatttctcctttttgcagatacaggatcacttctgtatgtaacttttttacatacattcgatacattcagcagggactcgtgaaacagcaggatgttgatcagatgttttgggaggttatgcagttgagaaaagagatgtcattggcaaagctgggttatttcaaagaggaactctgatgctctgcgtgggaccatgcctgaactccccgaataactgaaaaatggctgaatatttttatggttacttgatatttatttccaaggagtgagcctaagacttttttccccttttgcaaattgctctaagaagtaccatgatttcttttaaactgatctatgctgtgtttgcttattctttagttgaacacactatgaagaattccaggtgtactagtgaatgtaatttatagttgccaaaaaaaaaaaaaacctgaaataaataaatgttagattgaatgtgtgtacattttctcttctagctctgacatggcatttagggttagcagaatgtattaaatagtaattttcaaactacacagtagcttccttccttgtgagaggcaagaaagaagtctgagtggatagtactcactttccaaggcccccacctctagaatggctttatttttatctgttttctatattgggtttcaaaaaagattttatttgaagaaatacttctgctgctacaaagtttgaaagttactattttaattattctgctctctgtaactgaaagaatccctttattttggttattcattaaaatataatagaaggcagtcagattttatcccagagatgtattcctgagtgtcttgatatagtgtattcatgttttatatgtgttgaccactatattgtcattggagggacatagatgtaaatgagtttgacgtgtgtcaaaggggtttaaaggggtgtggattgaatgaatggtacgtgcgaagtatatgctgattatagaaccacttgatctctgcattccaaattgtaaaactgactcaactggagaaattataacaaagaggtttgtggtagacatgtaataagtatagaaaagcaaaaagaaaagagaaactgctttagtttctgtttagagaaagctgctgttaatatttttggatagtagcctttcagctttcagatattttctacttacatatgcatatttttgaaacaaaaagtaggctttttttttgctttttaaacctaaacattaaatatattttcccttgggtaaacctacacatcctaatccctgtttatagaattttaacataatttaattgtgtttggagatgaggtggttttcagtttatttttcatattataatgctgtgacgagtatccttatctgtacacttctgaacattgtggagttctttcatgtggatgcctggagataaaattgtgtcgagatatatatgtatttttaaatgtttgatctgcattgctagattgccatccagaaaagttaatcaatttgtattcacagcagcagtgtacaagagggctggttttctgaagataacatttttttcagtcctgttcagaggtttggtcaatcttacctgtagatgacttcagccaccaggctggatgggagcccacagacaaaaggacattggtgtatgttatggtgaaaaccatcagtaccatgcctagctcaagaatgtgaaattgaacctgaaaaaaactttgaacctacaattttatgttctgaaaatagttattctaatgtgagggcattaataagaatatgtaccatcaaagcttcagaagattttccgtacaaactaaaatcacttttggagaaagtacctaaataaaaagagaaacaaatccaggagatactgtacggtttgaaagaaaggtaatcaaatactcagaaaaagtttgttgatgacttaaaaaggataaataaaaagtaagactaaagaaaatcagtatacccattaataataaatctttagtaatctataaggggaagaatgcttttcaaccttatacactagaagcatgctctttaaaattaatgcaacaggatgacgacttgatgtagaaactatatgtggaattatagattaaaatgtgattgaaacatatttagaaaatgtgattatcttcctgatcctactccctttaggaagaacttcttaaactggaagcaggaaaaaaaaaaaccataaaagataaccataaaagaatataagttatggtatattataaattcttaatttagaaatcgtgcatcagtagttaggcattgtggctcatgcctgtaatcccagcactttgggaggcagaggcagaaggattacttgagctgcttgagcccaggagtttgagacgggcctgggaaaaatagggaaactccatttacacacacacacacacacacacacacacacacactgtgtccatgaacttgggaggatgaggtgggaggattgcttgagcccaggggttcaagtccaacttgggcaacatagggagaccttgtctctaaaaaaaaaactaaagctaaactacaaactgtgaggcaatatctgcaacatttataactagtaatagcttagtatcaagaatgtatgcagaaattctacaaaccaacaaaaaaggacagtgtcacagaaaaacaggcaaaagactgaaccaggccttccacacaattagaagtgcatgtgggccaataaacattaagaggttttcatctctcaatcaggaaaacgtaaatcaagatgacaatgacatgttcaaattcattcgattggtgaaaatgaagaaacacaaagtcaagttttggagagggttttagtcattaggatcactcacatattgctgatgggggtatcaattggtatatccactgtgaaaaaccattcactagaaaagttgggccaggcccagtggctcatgcctcttggctttgggaggccaaggtaggaggatcacttgagcccaagagttcaagaccagcttgagcaacatagggagaccacatctgcacaaaaagatttttttgaattagctgggcatggtggtgcatgcctgtggtcccagctacttgggaagctgaggtggaaggattgcttaagcccaggaggttgaggctgcagtgaatcatgattgtgccactgcactcttaccttgggtgacagagtaagatcataccttaaaaaaaaaaaaaaagtatacccatgggtcagcaatttcacttttcagtatatacttgagaaatgcttgcacaggtcccccagatcacacatataagaatgttctggaataaattaaaatgtctatttttaggaaggtgtaatgtgttcacagaatgggtgattattacatggcagcaaaatgaatgaataccagctacttgcagcacaataactcagaatgaaaaagcaattctgagaaaactatatgtgacatgatacttttcttataaaagtcaagaacaactaaaactgaacagctgtttaggcattgacatatgtgacaaaacttttaaaaagtaataaagttcaagatagtggttacctctggagaggtagaggaggagcaaatctatgagtaagtcactggtaatgttttagtccctgggttaggtggtgggttttggggtggttcatttgtcattaaaagtaagtacatgagctgggtgtagtggtgcgtgcttatagtcccagctacttgggagtctgagataggaagatccttgaggccagttcaaggctatagtgtgctatgatttcacctgtgaatagctactatattccaacctgggcaacgtagaccttgcccccctttaaaaaaattcaaaaacaaaataaatgcatggacaaatgaataagagagttatgcatggaacatcggtggtgtattatgaatcaagcattattactagctcagttatatgtgccttcattccaaaacaaaaaataaaaggtaagaaaattgttgaattgcatttgagagagaggaaaggaaagaattcaggtctgaatcttaggcttttggcttgagctattgcagtttattgagatggggaaatacatggtggggaaagtttgggtatgtgcataacagagacagaaattcagtgtttgacagatcaagtgtgaggtgcccactgagcatcaaagtggatatgttaagcaggtattggatgtacaaatctaaattcagtaaggtcagtccaggagaaaatttggggagtagttagccatgggatcagatgggcgctttagggacactttggagatgaagtacagcactgagccctgagttcctgtgacagagaagcagcctgcaaagacgaaaggaggagctgttaggaagagcaaggcaacagaaaaggaagaaccagcatgctgattatgttcaggagagtgtttctacgctgaatttaattgccaagattaccaattctaaagaagaggaggactcttggacaagtttttagaagttggtttggagctggggtgagagcctggcctaatggagacagctctggattgggagtcacttagacctacattctggtctaggtttggctcccaaaaactgggaaggttagttaggtggccactcctctctcttcatggtctctctcagcttgaagacaatttacagtctttgactaagcatccacactggaagaacaagatttggtttctgaacattgggtcttagtccttaaaataacttgcaacctgttacgtcttcacttactcccatcgccaccacaagaatcctgtgtgtttttgttttgtgcatccagtctaaaacgggtctgcttttattcataggcttttgttttcagtggtttttgttgttgcatttttccctagataaaatgttttttctataagacactgcttaaaagagtccaatgcagtatgaatttgtatttgtgtttaacttttgtgcttaacagatctgccatggctgaactctcagttgcttaagcaaaattctggggcttattctaggttcctttatttgtcattgtcactcccattccagttatcagcaaattccatcagctgtctccgagacatcttaaatctgtctacctccctccatgtccactgctaccactctgcccaagctattatcatctttcacctgaactcctgcactaatgtctgctgtccttgcatccactcctgccctcctacaatcactgacggcagccgcagggatctttataaaacgaaaatcagataatgtcacttccctgcttaaagccctttgagtggcttcccattgcacttagaaaaaaaaaaaaaaaaaaaaactggccaggtgcgatggctcatgcctgtaatcccagcactttgggaggccgaggcgggcggatcccctgaggttggtagttcgagacctgcttggccaacatggagaaaccctgtctctactaaaaacacaaaattagtcaggtgtgatggcgcatgcctgtaatcccagctacttgggaggctgagtcaggagaaacgctcgaacccaggaggcagaggttgtggtgagttgacatcacgccattgcactccagcctgggcaacaagagtgaaactccgtctgaaaaaaaaaaaaaaaaacccaaactcaatagaaaatcaagttttcatagtggtagttgttaacagagaaataacaatgaaagctttaaaaaactccatgaaaatttgcaaaacttaaaaaaaaaatgtagaagaggactaaacttgataaaatattaaaagaattgaaacccttcctaaaggcagcttctcaagggagcacaagttcacacacagtttacttttggaggaacgtctgaggtcatgaggactagattctagagctacaggtctcagggacagtctcgagggatacagggcccccatcaccacatccccagatttaaccgcagcagctcagcttttatctgtatctgttggagctctctaggaaatgtcaataccaaagcaaacccaaatcacaactagattagattactattcaagagaatgattctctaccgaaactctgcaaaatggggatatcaagagagttggaaaatgtaagacgtaaagaccataatcaggaaaatacgcatcatatttgttattcactgagagggaggaatttccacttaaatcctatttccagcagctggattgtgctctcagtggagtgctctggattctgattaatagagattttctagtcctcccagcaacttccttctcaattctcttcactttccgcagatctcggcaccagggttgcatcttgtgggctccattgtgttttcacacaatgtgctatttgtccttcacagtgttttggtttatttttctgtttgtccatcttgtttttgaacaattgccagcatttaaaaatgaggaaatctaaaatctgcatttcaagctgctcttttttaaaatgtgccgtttcgacaacactgagcccacagtcttgaatgacaacacttgggtggagctgagtgactccacctgtcgggtggctacacccttgctcagggtatgcactccatggtttgctctatggcccaccatcctggattgtctccctgacaccaaggctaagggacccactttactcacttatctgctgggccttggaagtatttcagttcggaaccccaattctaaccttagcttctcaggccattaaatgaaatctcatttctatgatgcttcctgtcacatcactgtgctgctgagaacatgaagtctgtgggtgaattggtggacgggatccagaatcattacttggcagtggattatagtgtgatgactcatttccggtggtctccaggagacttggctgggagcttctcttggagtctagggttagccagaggctacatgttttaggcatcttaattcatattttatctaaaggcatataaatccttaaaaaaaatcatttgacttcatccttgctccctacatccagccagtaaccattgctttgttttacatcgcgtgcttcaggctttactacagcctacctggattttgcagtagcttcttaaactgcttaaactttggatattgccccagccaacacattctgccacagagatctctctgagttaaatgggattgtatcatgccccacacccaagcagatagaaactgtcaatagatacacttagaatgaatatgcatggaatcaaattacattcagaatctaccactataggtagtgaatacaacaggatagcagaggctgggaagggtaatgggggttggggggtgggaggataaaggggttgggtaatgggtgtaaaaatctatagaaggaatatgatctgttgtttggtagcacaatagggtaaatacagttaataatttattgtatatttcacaataaaggagtggatttggaatgttctcaacacaaatgataaatgtttgaggtgatggataccccaattaccctgatttgatcattatacgttgtatgtttgtatcaaaatatcatatgtaccccataaatatgtacaactattatgtatccataaaaattggaaataaactaccaccatctttcttcagcctattttcctatctcctctcgcaccatactaggcacacaatctctgtacctgtgctgtcttccaagccattgctcatgttttaagaaatatacttattgtttaatatatcctgtaccactgtaggatgactgtagttaacaataatgtgtagtttcaaatagctaatagctggaaggaagttgttgaatgtttccaacataaagaaatgataagtgtttgagatgatggatatgctaattaccctgatctgatcactacacattatatgtatggaaatatcattgtgtaccccatgaatatgggcaattattatttgttaattaaaaaaataaaaaaaagacccacccactgtttaa

SEQ ID NO: 497 - DNA, 9536 bp, Homo sapiens
ggttacctggcggcgggcgggcgcggccgggagcggagggccgcggtcgcgaagaggatgaagagagagttcccgaacaagtcggaagcagctcacaacaccggacgccgcgcggcagggctgtggacctggggtggtttcgtgtcccagtcttaggaaactacgcgcgaggcaccgtgctgaggcgtagaggtcaccctcgggaggtttcggtgaaacctggtgggaaattccgggcaggcgcccggagtcgcgcccaagtaggcagctccgtgccgccagacttgtgttcgggggagttgagacgaactgcacgggtgggattgcatggctctgccctcccagcgttgacaactcgccccgaccgcccaggaagcgcgagcttactggctccagaagtgatgatgctgggtggaagtcgcagcatgtgaagagttgccggttgttatgggattaaaaaagatgaaagggttatcttatgatgaggcttttgctatggctaatgatcccttggaaggcttccatgaagtaaaccttgcttcacctacttctccggaccttcttggtgtgtatgaatcaggaactcaagagcagactacctcaccaagtgtcatctaccggccacacccttcagctttatcctctgtacctatccaggcaaatgcattagatgtttctgaacttcctacacaacccgtgtattcatcccccagacgtttaaattgtgcggaaatatctagtatcagctttcatgttacagacccagccccttgctctacctctggagtcacagctggattaactaaattaactacaagaaaggacaactataatgcagagagagagtttttacagggtgctactataacagaggcttgcgatggcagtgatgatatttttgggttgagtactgatagtctgtctcgtttacgaagcccatctgttttggaagttagagaaaagggctatgaacgattaaaagaagaactcgcaaaagctcagagggaactgaagttaaaagatgaagaatgtgagaggctttcaaaagtgcgagatcaacttggacaggaattggaagaactcacagctagtctatttgaggaagctcataaaatggtgagagaagcaaatatcaagcaggcaacagcagaaaaacagctaaaagaagcacaaggaaaaattgatgtacttcaagctgaagtagctgcattgaagacacttgtattgtccagttctccaacatcacctacgcaggagcctttgccaggtggaaagacaccttttaaaaaggggcatacaagaaataaaagcacaagcagtgctatgagtggcagtcatcaggacctcagtgtgatacagccaattgtaaaagactgcaaagaggctgacttatccttgtataatgaattccgattgtggaaggatgagcccacaatggacaggacgtgtcctttcttagacaaaatctaccaggaagatatctttccatgtttaacattctcaaaaagtgagttggcttcagctgttctggaggctgtggaaaacaatactctaagcattgaaccagtgggattacaacctatccggtttgtgaaagcttctgcagttgaatgcggaggaccaaaatcacttctgtatgtaacttttttacatacattcgatacattcagcagggactcgtgaaacagcaggatgttgatcagatgttttgggaggttatgcagttgagaaaagagatgtcattggcaaagctgggttatttcaaagaggaactctgatgctctgcgtgggaccatgcctgaactccccgaataactgaaaaatggctgaatatttttatggttacttgatatttatttccaaggagtgagcctaagacttttttccccttttgcaaattgctctaagaagtaccatgatttcttttaaactgatctatgctgtgtttgcttattctttagttgaacacactatgaagaattccaggtgtactagtgaatgtaatttatagttgccaaaaaaaaaaaaaacctgaaataaataaatgttagattgaatgtgtgtacattttctcttctagctctgacatggcatttagggttagcagaatgtattaaatagtaattttcaaactacacagtagcttccttccttgtgagaggcaagaaagaagtctgagtggatagtactcactttccaaggcccccacctctagaatggctttatttttatctgttttctatattgggtttcaaaaaagattttatttgaagaaatacttctgctgctacaaagtttgaaagttactattttaattattctgctctctgtaactgaaagaatccctttattttggttattcattaaaatataatagaaggcagtcagattttatcccagagatgtattcctgagtgtcttgatatagtgtattcatgttttatatgtgttgaccactatattgtcattggagggacatagatgtaaatgagtttgacgtgtgtcaaaggggtttaaaggggtgtggattgaatgaatggtacgtgcgaagtatatgctgattatagaaccacttgatctctgcattccaaattgtaaaactgactcaactggagaaattataacaaagaggtttgtggtagacatgtaataagtatagaaaagcaaaaagaaaagagaaactgctttagtttctgtttagagaaagctgctgttaatatttttggatagtagcctttcagctttcagatattttctacttacatatgcatatttttgaaacaaaaagtaggctttttttttgctttttaaacctaaacattaaatatattttcccttgggtaaacctacacatcctaatccctgtttatagaattttaacataatttaattgtgtttggagatgaggtggttttcagtttatttttcatattataatgctgtgacgagtatccttatctgtacacttctgaacattgtggagttctttcatgtggatgcctggagataaaattgtgtcgagatatatatgtatttttaaatgtttgatctgcattgctagattgccatccagaaaagttaatcaatttgtattcacagcagcagtgtacaagagggctggttttctgaagataacatttttttcagtcctgttcagaggtttggtcaatcttacctgtagatgacttcagccaccaggctggatgggagcccacagacaaaaggacattggtgtatgttatggtgaaaaccatcagtaccatgcctagctcaagaatgtgaaattgaacctgaaaaaaactttgaacctacaattttatgttctgaaaatagttattctaatgtgagggcattaataagaatatgtaccatcaaagcttcagaagattttccgtacaaactaaaatcacttttggagaaagtacctaaataaaaagagaaacaaatccaggagatactgtacggtttgaaagaaaggtaatcaaatactcagaaaaagtttgttgatgacttaaaaaggataaataaaaagtaagactaaagaaaatcagtatacccattaataataaatctttagtaatctataaggggaagaatgcttttcaaccttatacactagaagcatgctctttaaaattaatgcaacaggatgacgacttgatgtagaaactatatgtggaattatagattaaaatgtgattgaaacatatttagaaaatgtgattatcttcctgatcctactccctttaggaagaacttcttaaactggaagcaggaaaaaaaaaaaccataaaagataaccataaaagaatataagttatggtatattataaattcttaatttagaaatcgtgcatcagtagttaggcattgtggctcatgcctgtaatcccagcactttgggaggcagaggcagaaggattacttgagctgcttgagcccaggagtttgagacgggcctgggaaaaatagggaaactccatttacacacacacacacacacacacacacacacacactgtgtccatgaacttgggaggatgaggtgggaggattgcttgagcccaggggttcaagtccaacttgggcaacatagggagaccttgtctctaaaaaaaaaactaaagctaaactacaaactgtgaggcaatatctgcaacatttataactagtaatagcttagtatcaagaatgtatgcagaaattctacaaaccaacaaaaaaggacagtgtcacagaaaaacaggcaaaagactgaaccaggccttccacacaattagaagtgcatgtgggccaataaacattaagaggttttcatctctcaatcaggaaaacgtaaatcaagatgacaatgacatgttcaaattcattcgattggtgaaaatgaagaaacacaaagtcaagttttggagagggttttagtcattaggatcactcacatattgctgatgggggtatcaattggtatatccactgtgaaaaaccattcactagaaaagttgggccaggcccagtggctcatgcctcttggctttgggaggccaaggtaggaggatcacttgagcccaagagttcaagaccagcttgagcaacatagggagaccacatctgcacaaaaagatttttttgaattagctgggcatggtggtgcatgcctgtggtcccagctacttgggaagctgaggtggaaggattgcttaagcccaggaggttgaggctgcagtgaatcatgattgtgccactgcactcttaccttgggtgacagagtaagatcataccttaaaaaaaaaaaaaaagtatacccatgggtcagcaatttcacttttcagtatatacttgagaaatgcttgcacaggtcccccagatcacacatataagaatgttctggaataaattaaaatgtctatttttaggaaggtgtaatgtgttcacagaatgggtgattattacatggcagcaaaatgaatgaataccagctacttgcagcacaataactcagaatgaaaaagcaattctgagaaaactatatgtgacatgatacttttcttataaaagtcaagaacaactaaaactgaacagctgtttaggcattgacatatgtgacaaaacttttaaaaagtaataaagttcaagatagtggttacctctggagaggtagaggaggagcaaatctatgagtaagtcactggtaatgttttagtccctgggttaggtggtgggttttggggtggttcatttgtcattaaaagtaagtacatgagctgggtgtagtggtgcgtgcttatagtcccagctacttgggagtctgagataggaagatccttgaggccagttcaaggctatagtgtgctatgatttcacctgtgaatagctactatattccaacctgggcaacgtagaccttgcccccctttaaaaaaattcaaaaacaaaataaatgcatggacaaatgaataagagagttatgcatggaacatcggtggtgtattatgaatcaagcattattactagctcagttatatgtgccttcattccaaaacaaaaaataaaaggtaagaaaattgttgaattgcatttgagagagaggaaaggaaagaattcaggtctgaatcttaggcttttggcttgagctattgcagtttattgagatggggaaatacatggtggggaaagtttgggtatgtgcataacagagacagaaattcagtgtttgacagatcaagtgtgaggtgcccactgagcatcaaagtggatatgttaagcaggtattggatgtacaaatctaaattcagtaaggtcagtccaggagaaaatttggggagtagttagccatgggatcagatgggcgctttagggacactttggagatgaagtacagcactgagccctgagttcctgtgacagagaagcagcctgcaaagacgaaaggaggagctgttaggaagagcaaggcaacagaaaaggaagaaccagcatgctgattatgttcaggagagtgtttctacgctgaatttaattgccaagattaccaattctaaagaagaggaggactcttggacaagtttttagaagttggtttggagctggggtgagagcctggcctaatggagacagctctggattgggagtcacttagacctacattctggtctaggtttggctcccaaaaactgggaaggttagttaggtggccactcctctctcttcatggtctctctcagcttgaagacaatttacagtctttgactaagcatccacactggaagaacaagatttggtttctgaacattgggtcttagtccttaaaataacttgcaacctgttacgtcttcacttactcccatcgccaccacaagaatcctgtgtgtttttgttttgtgcatccagtctaaaacgggtctgcttttattcataggcttttgttttcagtggtttttgttgttgcatttttccctagataaaatgttttttctataagacactgcttaaaagagtccaatgcagtatgaatttgtatttgtgtttaacttttgtgcttaacagatctgccatggctgaactctcagttgcttaagcaaaattctggggcttattctaggttcctttatttgtcattgtcactcccattccagttatcagcaaattccatcagctgtctccgagacatcttaaatctgtctacctccctccatgtccactgctaccactctgcccaagctattatcatctttcacctgaactcctgcactaatgtctgctgtccttgcatccactcctgccctcctacaatcactgacggcagccgcagggatctttataaaacgaaaatcagataatgtcacttccctgcttaaagccctttgagtggcttcccattgcacttagaaaaaaaaaaaaaaaaaaaaactggccaggtgcgatggctcatgcctgtaatcccagcactttgggaggccgaggcgggcggatcccctgaggttggtagttcgagacctgcttggccaacatggagaaaccctgtctctactaaaaacacaaaattagtcaggtgtgatggcgcatgcctgtaatcccagctacttgggaggctgagtcaggagaaacgctcgaacccaggaggcagaggttgtggtgagttgacatcacgccattgcactccagcctgggcaacaagagtgaaactccgtctgaaaaaaaaaaaaaaaaacccaaactcaatagaaaatcaagttttcatagtggtagttgttaacagagaaataacaatgaaagctttaaaaaactccatgaaaatttgcaaaacttaaaaaaaaaatgtagaagaggactaaacttgataaaatattaaaagaattgaaacccttcctaaaggcagcttctcaagggagcacaagttcacacacagtttacttttggaggaacgtctgaggtcatgaggactagattctagagctacaggtctcagggacagtctcgagggatacagggcccccatcaccacatccccagatttaaccgcagcagctcagcttttatctgtatctgttggagctctctaggaaatgtcaataccaaagcaaacccaaatcacaactagattagattactattcaagagaatgattctctaccgaaactctgcaaaatggggatatcaagagagttggaaaatgtaagacgtaaagaccataatcaggaaaatacgcatcatatttgttattcactgagagggaggaatttccacttaaatcctatttccagcagctggattgtgctctcagtggagtgctctggattctgattaatagagattttctagtcctcccagcaacttccttctcaattctcttcactttccgcagatctcggcaccagggttgcatcttgtgggctccattgtgttttcacacaatgtgctatttgtccttcacagtgttttggtttatttttctgtttgtccatcttgtttttgaacaattgccagcatttaaaaatgaggaaatctaaaatctgcatttcaagctgctcttttttaaaatgtgccgtttcgacaacactgagcccacagtcttgaatgacaacacttgggtggagctgagtgactccacctgtcgggtggctacacccttgctcagggtatgcactccatggtttgctctatggcccaccatcctggattgtctccctgacaccaaggctaagggacccactttactcacttatctgctgggccttggaagtatttcagttcggaaccccaattctaaccttagcttctcaggccattaaatgaaatctcatttctatgatgcttcctgtcacatcactgtgctgctgagaacatgaagtctgtgggtgaattggtggacgggatccagaatcattacttggcagtggattatagtgtgatgactcatttccggtggtctccaggagacttggctgggagcttctcttggagtctagggttagccagaggctacatgttttaggcatcttaattcatattttatctaaaggcatataaatccttaaaaaaaatcatttgacttcatccttgctccctacatccagccagtaaccattgctttgttttacatcgcgtgcttcaggctttactacagcctacctggattttgcagtagcttcttaaactgcttaaactttggatattgccccagccaacacattctgccacagagatctctctgagttaaatgggattgtatcatgccccacacccaagcagatagaaactgtcaatagatacacttagaatgaatatgcatggaatcaaattacattcagaatctaccactataggtagtgaatacaacaggatagcagaggctgggaagggtaatgggggttggggggtgggaggataaaggggttgggtaatgggtgtaaaaatctatagaaggaatatgatctgttgtttggtagcacaatagggtaaatacagttaataatttattgtatatttcacaataaaggagtggatttggaatgttctcaacacaaatgataaatgtttgaggtgatggataccccaattaccctgatttgatcattatacgttgtatgtttgtatcaaaatatcatatgtaccccataaatatgtacaactattatgtatccataaaaattggaaataaactaccaccatctttcttcagcctattttcctatctcctctcgcaccatactaggcacacaatctctgtacctgtgctgtcttccaagccattgctcatgttttaagaaatatacttattgtttaatatatcctgtaccactgtaggatgactgtagttaacaataatgtgtagtttcaaatagctaatagctggaaggaagttgttgaatgtttccaacataaagaaatgataagtgtttgagatgatggatatgctaattaccctgatctgatcactacacattatatgtatggaaatatcattgtgtaccccatgaatatgggcaattattatttgttaattaaaaaaataaaaaaaagacccacccactgtttaa

SEQ ID NO: 498 - DNA, 9247 bp, Homo sapiens
gcttccggcgcaggcgcagtcccgcgttccctcggcggctgccggcgtagtgagcccgccgccgtggagtgtagcggaaagggctcgccgtcctcctccgtttctcgctgcttcgggacgcgctctctgcggctctgtgagcgcccctgagcgccggcagcggccgcggtgggttcttcaggttatcttatgatgaggcttttgctatggctaatgatcccttggaaggcttccatgaagtaaaccttgcttcacctacttctccggaccttcttggtgtgtatgaatcaggaactcaagagcagactacctcaccaagtgtcatctaccggccacacccttcagctttatcctctgtacctatccaggcaaatgcattagatgtttctgaacttcctacacaacccgtgtattcatcccccagacgtttaaattgtgcggaaatatctagtatcagctttcatgttacagacccagccccttgctctacctctggagtcacagctggattaactaaattaactacaagaaaggacaactataatgcagagagagagtttttacagggtgctactataacagaggcttgcgatggcagtgatgatatttttgggttgagtactgatagtctgtctcgtttacgaagcccatctgttttggaagttagagaaaagggctatgaacgattaaaagaagaactcgcaaaagctcagagggaactgaagttaaaagatgaagaatgtgagaggctttcaaaagtgcgagatcaacttggacaggaattggaagaactcacagctagtctatttgaggaagctcataaaatggtgagagaagcaaatatcaagcaggcaacagcagaaaaacagctaaaagaagcacaaggaaaaattgatgtacttcaagctgaagtagctgcattgaagacacttgtattgtccagttctccaacatcacctacgcaggagcctttgccaggtggaaagacaccttttaaaaaggggcatacaagaaataaaagcacaagcagtgctatgagtggcagtcatcaggacctcagtgtgatacagccaattgtaaaagactgcaaagaggctgacttatccttgtataatgaattccgattgtggaaggatgagcccacaatggacaggacgtgtcctttcttagacaaaatctaccaggaagatatctttccatgtttaacattctcaaaaagtgagttggcttcagctgttctggaggctgtggaaaacaatactctaagcattgaaccagtgggattacaacctatccggtttgtgaaagcttctgcagttgaatgcggaggaccaaaatcacttctgtatgtaacttttttacatacattcgatacattcagcagggactcgtgaaacagcaggatgttgatcagatgttttgggaggttatgcagttgagaaaagagatgtcattggcaaagctgggttatttcaaagaggaactctgatgctctgcgtgggaccatgcctgaactccccgaataactgaaaaatggctgaatatttttatggttacttgatatttatttccaaggagtgagcctaagacttttttccccttttgcaaattgctctaagaagtaccatgatttcttttaaactgatctatgctgtgtttgcttattctttagttgaacacactatgaagaattccaggtgtactagtgaatgtaatttatagttgccaaaaaaaaaaaaaacctgaaataaataaatgttagattgaatgtgtgtacattttctcttctagctctgacatggcatttagggttagcagaatgtattaaatagtaattttcaaactacacagtagcttccttccttgtgagaggcaagaaagaagtctgagtggatagtactcactttccaaggcccccacctctagaatggctttatttttatctgttttctatattgggtttcaaaaaagattttatttgaagaaatacttctgctgctacaaagtttgaaagttactattttaattattctgctctctgtaactgaaagaatccctttattttggttattcattaaaatataatagaaggcagtcagattttatcccagagatgtattcctgagtgtcttgatatagtgtattcatgttttatatgtgttgaccactatattgtcattggagggacatagatgtaaatgagtttgacgtgtgtcaaaggggtttaaaggggtgtggattgaatgaatggtacgtgcgaagtatatgctgattatagaaccacttgatctctgcattccaaattgtaaaactgactcaactggagaaattataacaaagaggtttgtggtagacatgtaataagtatagaaaagcaaaaagaaaagagaaactgctttagtttctgtttagagaaagctgctgttaatatttttggatagtagcctttcagctttcagatattttctacttacatatgcatatttttgaaacaaaaagtaggctttttttttgctttttaaacctaaacattaaatatattttcccttgggtaaacctacacatcctaatccctgtttatagaattttaacataatttaattgtgtttggagatgaggtggttttcagtttatttttcatattataatgctgtgacgagtatccttatctgtacacttctgaacattgtggagttctttcatgtggatgcctggagataaaattgtgtcgagatatatatgtatttttaaatgtttgatctgcattgctagattgccatccagaaaagttaatcaatttgtattcacagcagcagtgtacaagagggctggttttctgaagataacatttttttcagtcctgttcagaggtttggtcaatcttacctgtagatgacttcagccaccaggctggatgggagcccacagacaaaaggacattggtgtatgttatggtgaaaaccatcagtaccatgcctagctcaagaatgtgaaattgaacctgaaaaaaactttgaacctacaattttatgttctgaaaatagttattctaatgtgagggcattaataagaatatgtaccatcaaagcttcagaagattttccgtacaaactaaaatcacttttggagaaagtacctaaataaaaagagaaacaaatccaggagatactgtacggtttgaaagaaaggtaatcaaatactcagaaaaagtttgttgatgacttaaaaaggataaataaaaagtaagactaaagaaaatcagtatacccattaataataaatctttagtaatctataaggggaagaatgcttttcaaccttatacactagaagcatgctctttaaaattaatgcaacaggatgacgacttgatgtagaaactatatgtggaattatagattaaaatgtgattgaaacatatttagaaaatgtgattatcttcctgatcctactccctttaggaagaacttcttaaactggaagcaggaaaaaaaaaaaccataaaagataaccataaaagaatataagttatggtatattataaattcttaatttagaaatcgtgcatcagtagttaggcattgtggctcatgcctgtaatcccagcactttgggaggcagaggcagaaggattacttgagctgcttgagcccaggagtttgagacgggcctgggaaaaatagggaaactccatttacacacacacacacacacacacacacacacacactgtgtccatgaacttgggaggatgaggtgggaggattgcttgagcccaggggttcaagtccaacttgggcaacatagggagaccttgtctctaaaaaaaaaactaaagctaaactacaaactgtgaggcaatatctgcaacatttataactagtaatagcttagtatcaagaatgtatgcagaaattctacaaaccaacaaaaaaggacagtgtcacagaaaaacaggcaaaagactgaaccaggccttccacacaattagaagtgcatgtgggccaataaacattaagaggttttcatctctcaatcaggaaaacgtaaatcaagatgacaatgacatgttcaaattcattcgattggtgaaaatgaagaaacacaaagtcaagttttggagagggttttagtcattaggatcactcacatattgctgatgggggtatcaattggtatatccactgtgaaaaaccattcactagaaaagttgggccaggcccagtggctcatgcctcttggctttgggaggccaaggtaggaggatcacttgagcccaagagttcaagaccagcttgagcaacatagggagaccacatctgcacaaaaagatttttttgaattagctgggcatggtggtgcatgcctgtggtcccagctacttgggaagctgaggtggaaggattgcttaagcccaggaggttgaggctgcagtgaatcatgattgtgccactgcactcttaccttgggtgacagagtaagatcataccttaaaaaaaaaaaaaaagtatacccatgggtcagcaatttcacttttcagtatatacttgagaaatgcttgcacaggtcccccagatcacacatataagaatgttctggaataaattaaaatgtctatttttaggaaggtgtaatgtgttcacagaatgggtgattattacatggcagcaaaatgaatgaataccagctacttgcagcacaataactcagaatgaaaaagcaattctgagaaaactatatgtgacatgatacttttcttataaaagtcaagaacaactaaaactgaacagctgtttaggcattgacatatgtgacaaaacttttaaaaagtaataaagttcaagatagtggttacctctggagaggtagaggaggagcaaatctatgagtaagtcactggtaatgttttagtccctgggttaggtggtgggttttggggtggttcatttgtcattaaaagtaagtacatgagctgggtgtagtggtgcgtgcttatagtcccagctacttgggagtctgagataggaagatccttgaggccagttcaaggctatagtgtgctatgatttcacctgtgaatagctactatattccaacctgggcaacgtagaccttgcccccctttaaaaaaattcaaaaacaaaataaatgcatggacaaatgaataagagagttatgcatggaacatcggtggtgtattatgaatcaagcattattactagctcagttatatgtgccttcattccaaaacaaaaaataaaaggtaagaaaattgttgaattgcatttgagagagaggaaaggaaagaattcaggtctgaatcttaggcttttggcttgagctattgcagtttattgagatggggaaatacatggtggggaaagtttgggtatgtgcataacagagacagaaattcagtgtttgacagatcaagtgtgaggtgcccactgagcatcaaagtggatatgttaagcaggtattggatgtacaaatctaaattcagtaaggtcagtccaggagaaaatttggggagtagttagccatgggatcagatgggcgctttagggacactttggagatgaagtacagcactgagccctgagttcctgtgacagagaagcagcctgcaaagacgaaaggaggagctgttaggaagagcaaggcaacagaaaaggaagaaccagcatgctgattatgttcaggagagtgtttctacgctgaatttaattgccaagattaccaattctaaagaagaggaggactcttggacaagtttttagaagttggtttggagctggggtgagagcctggcctaatggagacagctctggattgggagtcacttagacctacattctggtctaggtttggctcccaaaaactgggaaggttagttaggtggccactcctctctcttcatggtctctctcagcttgaagacaatttacagtctttgactaagcatccacactggaagaacaagatttggtttctgaacattgggtcttagtccttaaaataacttgcaacctgttacgtcttcacttactcccatcgccaccacaagaatcctgtgtgtttttgttttgtgcatccagtctaaaacgggtctgcttttattcataggcttttgttttcagtggtttttgttgttgcatttttccctagataaaatgttttttctataagacactgcttaaaagagtccaatgcagtatgaatttgtatttgtgtttaacttttgtgcttaacagatctgccatggctgaactctcagttgcttaagcaaaattctggggcttattctaggttcctttatttgtcattgtcactcccattccagttatcagcaaattccatcagctgtctccgagacatcttaaatctgtctacctccctccatgtccactgctaccactctgcccaagctattatcatctttcacctgaactcctgcactaatgtctgctgtccttgcatccactcctgccctcctacaatcactgacggcagccgcagggatctttataaaacgaaaatcagataatgtcacttccctgcttaaagccctttgagtggcttcccattgcacttagaaaaaaaaaaaaaaaaaaaaactggccaggtgcgatggctcatgcctgtaatcccagcactttgggaggccgaggcgggcggatcccctgaggttggtagttcgagacctgcttggccaacatggagaaaccctgtctctactaaaaacacaaaattagtcaggtgtgatggcgcatgcctgtaatcccagctacttgggaggctgagtcaggagaaacgctcgaacccaggaggcagaggttgtggtgagttgacatcacgccattgcactccagcctgggcaacaagagtgaaactccgtctgaaaaaaaaaaaaaaaaacccaaactcaatagaaaatcaagttttcatagtggtagttgttaacagagaaataacaatgaaagctttaaaaaactccatgaaaatttgcaaaacttaaaaaaaaaatgtagaagaggactaaacttgataaaatattaaaagaattgaaacccttcctaaaggcagcttctcaagggagcacaagttcacacacagtttacttttggaggaacgtctgaggtcatgaggactagattctagagctacaggtctcagggacagtctcgagggatacagggcccccatcaccacatccccagatttaaccgcagcagctcagcttttatctgtatctgttggagctctctaggaaatgtcaataccaaagcaaacccaaatcacaactagattagattactattcaagagaatgattctctaccgaaactctgcaaaatggggatatcaagagagttggaaaatgtaagacgtaaagaccataatcaggaaaatacgcatcatatttgttattcactgagagggaggaatttccacttaaatcctatttccagcagctggattgtgctctcagtggagtgctctggattctgattaatagagattttctagtcctcccagcaacttccttctcaattctcttcactttccgcagatctcggcaccagggttgcatcttgtgggctccattgtgttttcacacaatgtgctatttgtccttcacagtgttttggtttatttttctgtttgtccatcttgtttttgaacaattgccagcatttaaaaatgaggaaatctaaaatctgcatttcaagctgctcttttttaaaatgtgccgtttcgacaacactgagcccacagtcttgaatgacaacacttgggtggagctgagtgactccacctgtcgggtggctacacccttgctcagggtatgcactccatggtttgctctatggcccaccatcctggattgtctccctgacaccaaggctaagggacccactttactcacttatctgctgggccttggaagtatttcagttcggaaccccaattctaaccttagcttctcaggccattaaatgaaatctcatttctatgatgcttcctgtcacatcactgtgctgctgagaacatgaagtctgtgggtgaattggtggacgggatccagaatcattacttggcagtggattatagtgtgatgactcatttccggtggtctccaggagacttggctgggagcttctcttggagtctagggttagccagaggctacatgttttaggcatcttaattcatattttatctaaaggcatataaatccttaaaaaaaatcatttgacttcatccttgctccctacatccagccagtaaccattgctttgttttacatcgcgtgcttcaggctttactacagcctacctggattttgcagtagcttcttaaactgcttaaactttggatattgccccagccaacacattctgccacagagatctctctgagttaaatgggattgtatcatgccccacacccaagcagatagaaactgtcaatagatacacttagaatgaatatgcatggaatcaaattacattcagaatctaccactataggtagtgaatacaacaggatagcagaggctgggaagggtaatgggggttggggggtgggaggataaaggggttgggtaatgggtgtaaaaatctatagaaggaatatgatctgttgtttggtagcacaatagggtaaatacagttaataatttattgtatatttcacaataaaggagtggatttggaatgttctcaacacaaatgataaatgtttgaggtgatggataccccaattaccctgatttgatcattatacgttgtatgtttgtatcaaaatatcatatgtaccccataaatatgtacaactattatgtatccataaaaattggaaataaactaccaccatctttcttcagcctattttcctatctcctctcgcaccatactaggcacacaatctctgtacctgtgctgtcttccaagccattgctcatgttttaagaaatatacttattgtttaatatatcctgtaccactgtaggatgactgtagttaacaataatgtgtagtttcaaatagctaatagctggaaggaagttgttgaatgtttccaacataaagaaatgataagtgtttgagatgatggatatgctaattaccctgatctgatcactacacattatatgtatggaaatatcattgtgtaccccatgaatatgggcaattattatttgttaattaaaaaaataaaaaaaagacccacccactgtttaa

SEQ ID NO: 499 - DNA, 2338 bp, Homo sapiens
gtctgacatagcaacttggactgaaacttcgtttttgttgaaggccaaacatataagctgagaattaggcttaaaaaatgcctggtttaacctcacttggctatttactgattacatcatctgcatttatagcttaatcatctgttaaattggggttctccacgcacacaggatcatgtggttgtgtttgtatatattaggagatatctataacctgaacatatacatagagagatgggttatgctccctggttaactaaaacgtggaaactttctaaagatgtgagagagctcttaaggcaattataaatagtcttttaaggaagattcatattgtatgttctgttgttgcaggccaagtggcatcagagctgagtgatggacgacctgcagtcccagaacctctccatggacatgactgactcccctcctgccttggctaataacagactggagaatggcatggctcagctgatcaccaccgaggcctggaacatcaactccactgacctggtaaagaaggccctggtgaccgtgccagccccatccattctgaacccccctgccgagtctcagagtggcatggctctgaaggtggcggccactgtgttgcagcccctgtgcctcggggagagcccagtggtgatgcccattcacatgcaggtggagggaagctccgcaccagagctcaatccgaatggcaatgccacctacgtcatgaccacccagggccccgtgcaactgcccgtggtgctggagcagcacgtctttcagcacctcaactcccctctggtcctgccgcaggaggccccatgctcctccagtaccatccacaacaacctcttccagggagcggaggaccccgaggcccagccccagctcctggacctgaggatccccagccagccgcaggagcccactttgccatttgaagctgtgctccagaatttgtttccctcccagggcactctcgggcccccaccctgtcagcctcctcctggctatgcccctgtgcccccacagccttttagctcccccttgtcccccctggtcccaccagccaccctcttggtgccgtatcctgtaatcgtccccttgcctgtgccagtccctattcccatccccatcccggtgcctcagagttctgaatccaagttcagctccagtttccccaagccaccatcttccttcggcctgcacccctttaaaggcacccagacccctctggaaaaagatgaactgaagccctttgacatcctccagcctaaggagtacttccagctcagccgccacacggtcattaagatgggaagtgagaacgaggccctggatctctccatgaagtcagtgccctggctcaaggctggtgaagtcagtcccccaatcttccaggaagatgcagccctagacctgtcagtggcagcccaccggaaatccgagcctccccctgagacactgtatgacagtggtgcatcagtggacagctcaggtcacacagtgatggagaaacttcccagtggcatggaaatttcttttgcccctgccacgtcccatgaggccccagccatgatggatagtcacatcagcagcagtgatgctgctaccgagatgctcagccagcccaaccaccccagcggcgaagtcaaggctgaaaataacattgagatggtgggcgagtcccaggcggccaaggtcattgtctctgtcgaagatgctgtgcctaccatattctgtggcaagatcaaaggcctctcaggggtgtccaccaaaaacttctccttcaaaagagaagactccgtgcttcagggctatgacatcaacagccaaggggaagagtccatgggaaatgcagagccccttaggaaacccatcaaaaaccggagcataaagttaaagaaagtgaactcccaggaaatacacatgctcccaatcaaaaaacaacggctggccaccttttttccaagaaagtaaataacggctttttaaaatttgtatgattataatatggggaaaggtgcattggttttataaaaaggcatttaaaacaaattatctttgttaattattttggggagtagttgggaaatggaaaggtgaattggctctagaggccctgtatgctagtatcattttcttttttaatttttgacttttcacaaatgagtaaataagagcaacctatttttcaagcagattgcacattttttgcagctttaatggaatattgggtgaattagaggggtaaaaaaagctattttcattgccacaaagtgctttgatgatgtaatacctaataaagggtaggatgaatatttcacaataaatgtttgtttgcact

SEQ ID NO: 500 - DNA, 3339 bp, Homo sapiens
gggcgcccagagacagcgccgcctcagatatcctgctggatgacattgtccttacccattctctcttcctcccgacggagaaatttctgcaggagctacaccagtactttgttcgggcaggaggcatggagggccctgaagggctgggccggaagcaagcctgtctagccatgcttctccatttcttggacacctaccaggggctgcttcaagaggaagagggggccggccacatcatcaaggatctatacctgctaattatgaaggacgagtccctttaccagggcctccgagaggacactctgaggctgcaccagctggtggagacggtggaactaaagattccagaggagaaccagccacccagcaagcaggtgaagccactcttccgccacttccgccggatagactcctgtctgcagacccgggtggccttccggggctctgatgagatcttctgccgtgtatacatgcctgaccactcttatgtgaccatacgcagccgcctttcagcatctgtgcaggacattctgggctctgtgacggagaaacttcaatattcagaggagcccgcggggcgtgaggattccctcatcctggtagctgtgtcctcctctggagagaaggtccttctccagcccactgaggactgtgttttcaccgcactgggcatcaacagccacctgtttgcctgtactcgggacagctatgaggctctggtgcccctccccgaggagatccaggtctcccctggagacacagagatccaccgagtggagcctgaggacgttgccaaccacctaactgccttccactgggagctgttccgatgtgtgcatgagctggagttcgtggactacgtgttccacggggagcgcggccgccgggagacggccaacttggagctgctgctgcagcgctgcagcgaggtcacgcactgggtggccaccgaagtgctgctctgcgaggccccgggcaagcgcgcgcagctgctcaagaagttcatcaagatcgcggccctctgcaagcagaaccaggacctgctgtctttctacgccgtggtcatggggctggacaacgccgctgtcagccgccttcgactcacctgggagaagctgccagggaaattcaagaacttgtttcgcaaatttgagaacctgacggacccctgcaggaaccacaaaagctaccgagaagtgatctccaaaatgaagccccctgtgattcccttcgtgcctctgatcctcaaagacctgactttcctgcacgaagggagtaagacccttgtagatggtttggtgaacatcgagaagctgcattcagtggccgaaaaagtgaggacaatccgcaaataccggagccggcccctttgcctggacatggaggcatcccccaatcacctgcagaccaaggcctatgtgcgccagtttcaggtcatcgacaaccagaacctcctcttcgagctctcctacaagctggaggcaaacagtcagtgagagtggaggctccagtcagacccgccagatccttgggcacctggcactcaagcactttgcacgatgtctcaaccaacatctgacatctttcccgtggagcaacttcctgctccacgggaaagaggtcgatggatttacccctggacccataagtctgttcatcctgctgaagtcccctccccattgctccttcaagccaaaactacactttgctggttcctgtcccctctgagaaaggggatagaaagctccttcctctatgtcctcccatcgagatctgttctggggatggagcttccaacttcctcttgcagcaggaaagaatgctgctcacccttctgtcttgcagagtgggattgtgggagggattggcagccttcttctccaccacctgtccagcttcttcctggtcagggctgggacccccaggaatattatgttgccgtgtgtgtgtgtgtgtgtgtgtgtgtgtgtgtgtgtgtgtgtgtcttcttttagggagcaggagtgcatctggtaattgagggtggatgttgtgtgtgctggggaggggtccttctgtttggtgctacccttgtctactctgcccctggatggtgcggggtgctttctccacccccacactccctgctcagctcctcgtgctgccctgcatgcccaggcttgtgagccaaggtgctttttggggcagggagtagcagcaggtgggaggggttacccatcagcccttgcaagtcccccactcaggcctctggaaggtccagggatgggctctgatgagagggtaaaagatgctcagggaaacacaggcctcagctgcctagaggaccctccccctgccttgcagtgggctcgggtagagcagtatcaggagctagggttgtctgctgcccacactcctgctttttgggatatctaactgctaaggagggagttgacatcccccttctggctcatgtgtctgacaccaacaacatggtctccgtccctctctcttagactctccctttgtcctccccatagagctggggtggggtggatccctatactggggcaggcagccccaaagtgggggagggggatggcagagactgtaaaggcgccactggactctggcaaggcctttattacctttactccctccctctcccatcaccagcctcaaggcctgaggggtgcaggggctcctggcagctactgggtgaggtttcctggcacagactcacccttctttctggcaccactctttcccttttgaagagacagcaacagccgtagcaaaagcagctgctgctcctgctatgagggtgtatatattttttacccaaagctctggaattgtacatttattttttaaaactcaaagagggaaagagccttgtatcatatgtgaacattgtatcataggtaatgttgtacagacccttttatacagtgatctgtcttgttcctgcagcaaaaatcctctatggacataggaggtgctgtgtcccatgccttcttgccctgacagtgtcccatgggcccccttctgctccctgccccctccctgctactgctgatgcactgtcctctccctgcagcccctggcttcccagccttcctcctgaccccttccaacagccttggaactccagctgccaccaccctctgggtcggacactgggacccactggcccagtcttggctgctgcttacccctagccttgatgcctgcccagggacccccagccccctcccgttgccctgcagctttaacagagtgaaccatgtgtattgtacaggcgcggttgtcattgcagaaaccgctgggtggagaagaagccgataaagtctatgaatc

SEQ ID NO: 501 - DNA, 886 bp, Homo sapiens
tttccgcgagcgccggcactgcccgctccgagcccgtgtctgtcgggtgccgagccaactttcctgcgtccatgcagccccgccggcaacggctgcctgctccctggtccgggcccaggggcccgcgccccaccgccccgctgctcgcgctgctgctgttgctcgccccggtggcggcgcccgcggggtccggggaccccgacgaccctgggcagcctcaggatgctggggtcccgcgcaggctcctgcagcaggcggcgcgcgcggcgcttcacttcttcaacttccggtccggctcgcccagcgcgctacgagtgctggccgaggtgcaggagggccgcgcgtggattaatccaaaagagggatgtaaagttcacgtggtcttcagcacagagcgctacaacccagagtctttacttcaggaaggtgagggacgtttggggaaatgttctgctcgagtgtttttcaagaatcagaaacccagaccaaccatcaatgtaacttgtacacggctcatcgagaaaaagaaaagacaacaagaggattacctgctttacaagcaaatgaagcaactgaaaaaccccttggaaatagtcagcatacctgataatcatggacatattgatccctctctgagactcatctgggatttggctttccttggaagctcttacgtgatgtgggaaatgacaacacaggtgtcacactactacttggcacagctcactagtgtgaggcagtgggtaagaaaaacctgaaaattaacttgtgccacaagagttacaatcaaagtggtctccttagactgaattcatgtgaacttctaatttcatatcaagagttgtaatcacatttatttcaataaatatgtgagttcctgcaaaaa

SEQ ID NO: 502 - DNA, 1545 bp, Homo sapiens
tttccgcgagcgccggcactgcccgctccgagcccgtgtctgtcgggtgccgagccaactttcctgcgtccatgcagccccgccggcaacggctgcctgctccctggtccgggcccaggggcccgcgccccaccgccccgctgctcgcgctgctgctgttgctcgccccggtggcggcgcccgcggggtccggggaccccgacgaccctgggcagcctcaggatgctggggtcccgcgcaggctcctgcagcaggcggcgcgcgcggcgcttcacttcttcaacttccggtccggctcgcccagcgcgctacgagtgctggccgaggtgcaggagggccgcgcgtggattaatccaaaagagggatgtaaagttcacgtggtcttcagcacagagcgctacaacccagagtctttacttcaggaaggtgagggacgtttggggaaatgttctgctcgagtgtttttcaagaatcagaaacccagaccaaccatcaatgtaacttgtacacggctcatcgagaaaaagaaaagacaacaagaggattacctgctttacaagcaaatgaagcaactgaaaaaccccttggaaatagtcagcatacctgataatcatggacatattgatccctctctgagactcatctgggatttggctttccttggaagctcttacgtgatgtgggaaatgacaacacaggtgtcacactactacttggcacagctcactagtgtgaggcagtggaaaactaatgatgatacaattgattttgattatactgttctacttcatgaattatcaacacaggaaataattccctgtcgcattcacttggtctggtaccctggcaaacctcttaaagtgaagtaccactgtcaagagctacagacaccagaagaagcctccggaactgaagaaggatcagctgtagtaccaacagagcttagtaatttctaaaaagaaaaaatgatctttttccgacttctaaacaagtgactatactagcataaatcattcttctagtaaaacagctaaggtatagacattctaataatttgggaaaacctatgattacaagtaaaaactcagaaatgcaaagatgttggttttttgtttctcagtctgctttagcttttaactctggaagcgcatgcacactgaactctgctcagtgctaaacagtcaccagcaggttcctcagggtttcagccctaaaatgtaaaacctggataatcagtgtatgttgcaccagaatcagcattttttttttaactgcaaaaaatgatggtctcatctctgaatttatatttctcattcttttgaacatactatagctaatatattttatgttgctaaattgcttctatctagcatgttaaacaaagataatatactttcgatgaaagtaaattataggaaaaaaattaactgttttaaaaagaacttgattatgttttatgatttcaggcaagtattcatttttaacttgctacctacttttaaataaatgtttacatttctaaataaaaaaaaaaaaaaaaaaaaa

SEQ ID NO: 503 - DNA, 1196 bp, Homo sapiens
acctttgagcgatggcggcgtctggggaaccccagaggcagtggcaagaggaggtggcggcggtggtagtggtgggctcctgcatgaccgacctggtcagtcttacttctcgtttgccaaaaactggagaaaccatccatggacataagttttttattggctttggagggaaaggtgccaaccagtgtgtccaagctgctcggcttggagcaatgacgtccatggtgtgtaaggttggcaaagattcttttggcaatgattatatagaaaacttaaaacagaatgatatttctacagaatttacatatcagactaaagatgctgctacaggaactgcttctataattgtcaataatgaaggccagaatatcattgtcatagtggctggagcaaatttacttttgaatacggaggatctgagggcagcagccaatgtcattagcagagccaaagtcatggtctgccagctcgaaataactccagcaacttctttggaagccctaacaatggcccgcaggagtggagtgaaaaccttgttcaatccagcccctgccattgctgacctggatccccagttctacaccctctcagatgtgttctgctgcaatgaaagtgaggctgagattttaactggcctcacggtgggcagcgctgcagatgctggggaggctgcattagtgctcttgaaaaggggctgccaggtggtaatcattaccttaggggctgaaggatgtgtggtgctgtcacagacagaacctgagccaaagcacattcccacagagaaagtcaaggctgtggataccacgggtgctggtgacagctttgtgggagctctggccttctacctggcttactatccaaatctgtccttggaagacatgctcaacagatccaatttcattgcagcagtcagtgtccaggctgcaggaacacagtcatcttacccttacaaaaaagaccttccgcttactctgttttgattgctattagtcccaaaataaatatacctgggaataaaatgtacttgggggtggctgctcctggctaatgcttattagaaaatgtcctcgtcccctttctttgcaaatattagttcttttacgaagtcatcctcaagcttcaatttatttataacgatgattcttttgctttccatgcatttgcacaaaacaaccagaattaaagattccacaacc

SEQ ID NO: 504 - DNA, 1438 bp, Homo sapiens
ggcagcccacgtccagggagggcggagggaggaggagaggcgcggagaggagggaggggagaggggagggaggaaggcgagagaaagggagctgcttccatcccggacttcccagagcctgcctggagcgcgtactcagcggctctcgggtcccagcgtcccagccgcggcccgcgctcctccgccccgctcctcctcctcctcttcctcctcctcctcctctctaggcacccccgtcccctccttccagcggctgcagcccccagccccaactctccgcgcttactcctgggacgcgcgtcctcgccccatcctttgcttccttccttccttccttcttccttcctcccctggctcccgccctccctctccaggtcgccctcccggggcccgattgtctcggtgccccgctcccggcccgcgccctgccccgtctctcccttgcacttcctgagtcgcccgccgccgccgtcgcagactcgccgcgggagccccagcccaacccgagcccgacagccactgccccggctccagctccagccccacagcccgcggcgcccgcccgagggagccccggcgcccggggaaggctccagtgggctagcgcgccctcgcccagccccgcgccccagccctgcccggcccggcgaggaaggaccgggaagatgaacaacggcggcaaagccgagaaggagaacaccccgagcgaggccaaccttcaggaggaggaggtccggaccctatttgtcagtggccttcctctggatatcaaacctcgggagctctatctgcttttcagaccatttaagggctatgagggttctcttataaagctcacatctaaacagcctgtaggttttgtcagttttgacagtcgctcagaagcagaggctgcaaagaatgctttgaatggcatccgcttcgatcctgaaattccgcaaacactacgactagagtttgctaaggcaaacacgaagatggccaagaacaaactcgtagggactccaaaccccagtactcctctgcccaacactgtacctcagttcattgccagagagccatatgagctcacagtgcctgcactttaccccagtagccctgaagtgtgggccccgtaccctctgtacccagcggagttagcgcctgctctacctcctcctgctttcacctatcccgcttcactgcatgcccagtgtttctctcctgaggcaaagcccaacacacctgtcttttgtccacttctccagcaaattagatttgtctctgggaatgtgtttgtaacataccaacctactgcagaccagcagagggagctcccatgttgaatttgtttgttagctattttcccccctttcacaaaaactatttcttgacgacctttgagagatttcaataaaaattttaatcagagcaaaaaaaaaaaaaaaaaaaaaaaaaa

SEQ ID NO: 505 - DNA, 2948 bp, Homo sapiens
ggcagcccacgtccagggagggcggagggaggaggagaggcgcggagaggagggaggggagaggggagggaggaaggcgagagaaagggagctgcttccatcccggacttcccagagcctgcctggagcgcgtactcagcggctctcgggtcccagcgtcccagccgcggcccgcgctcctccgccccgctcctcctcctcctcttcctcctcctcctcctctctaggcacccccgtcccctccttccagcggctgcagcccccagccccaactctccgcgcttactcctgggacgcgcgtcctcgccccatcctttgcttccttccttccttccttcttccttcctcccctggctcccgccctccctctccaggtcgccctcccggggcccgattgtctcggtgccccgctcccggcccgcgccctgccccgtctctcccttgcacttcctgagtcgcccgccgccgccgtcgcagactcgccgcgggagccccagcccaacccgagcccgacagccactgccccggctccagctccagccccacagcccgcggcgcccgcccgagggagccccggcgcccggggaaggctccagtgggctagcgcgccctcgcccagccccgcgccccagccctgcccggcccggcgaggaaggaccgggaagatgaacaacggcggcaaagccgagaaggagaacaccccgagcgaggccaaccttcaggaggaggaggtccggaccctatttgtcagtggccttcctctggatatcaaacctcgggagctctatctgcttttcagaccatttaagggctatgagggttctcttataaagctcacatctaaacagcctgtaggttttgtcagttttgacagtcgctcagaagcagaggctgcaaagaatgctttgaatggcatccgcttcgatcctgaaattccgcaaacactacgactagagtttgctaaggcaaacacgaagatggccaagaacaaactcgtagggactccaaaccccagtactcctctgcccaacactgtacctcagttcattgccagagagccatatgagctcacagtgcctgcactttaccccagtagccctgaagtgtgggccccgtaccctctgtacccagcggagttagcgcctgctctacctcctcctgctttcacctatcccgcttcactgcatgcccagatgcgctggctccctccctccgaggctacttctcagggctggaagtcccgtcagttctgctgaatactatgtcccaggtgtgtgatggcggctgcaatctgtcttgtgggtattaatgcaatcttcagtggtggctactgttctctagctgttctacaaaactggagcatgctggcttgaaaaacccttgcccagttttgatcccttcaagactttgtcacagcctctatcacacatctgtttttctcgaagaaaaaaatataattaataaaaatgttttactcttttacactgtataattgtaagaaatagcgtattatttgtgaatgcatggtctgaaatttctgtacagtttggagatattttcaaacgaaacgtaagagaagtcaacaataaaaccaagaaaagtgagtatttttataccaaacattttaagtatgctgggatggacgatcttacactggtttggatcacagtttttgttcttgacttttgaatgcttgtaattaaaaatatctatttttttcctctgaagtaagttgcatgtttgaggcatgtttccaaatattatcaaaatatcctgaattgtattgtgaatatatagaaatctgtgcctggccggagtccagggtaaattagtagcatggtgttagatgttagaaacagaactgttatttgcagtgttaggtctaggatcccagttctagtaggacagccctgcaagacaatcaaccagaagcctccaggagcttctacctatggcttattcacaactgggcaagaaaacatcattggtaagaactgctgagtgtgcccttagaaagccctagtagctccagctgtgactatatcaactgtgtgccaagtgtgactttgtacagttttatgtttccactctcctgtatgtgtagccactcgatgcctaacctaccttccacaagccagccccgcatccctgctcccgcagtgtaagtgcagagcctgcctcactggtaagggaaaaccttggcttgggaggccagccctggcccttgaaggggttggctgtgcccagcccacctggctgcagtgggcagctcatgtctgtatctccaaagtgatgtttgtttgcaaaacaccggctgaactgagctggtgttgccaactcttggcagcactgggccaaaccgaccacataccatgagctcccaaatggcgtgtgctcactgtgagacgtcctgccacaccccacaggagacggaggcagtgggcatttggaaccaattctattcagacttcgtcaaagccaaagtcagtctggtgttgtcagttgacacatctccagagttcatgacagctcaacctctccccttgtacagaagccatttttgtaaaaccacactgacctaaattcagctgccaaacacagtctttcctattgatccgctcggcttatgttgaaaatttcaatgtcatgattacctggttggtttgggtttttgttttgttattttccattagaaatataaagatgtcaagaagcttttaaaggtcaacacaaaaaaccaaggccaggagtgaggggctctttcttaccgtaaataaggggaaaaggcagttagctcaaggacttgtgacggatccactttggtgttcaaggacctgcttatgccctcagtgccaatcggctcttggtgagatgactgtactcctaaggaaaatagccacttctgcagtctattatgcttttataactgtttaaaggtacttttctat

SEQ ID NO: 506 - DNA, 3034 bp, Homo sapiens
ggcagcccacgtccagggagggcggagggaggaggagaggcgcggagaggagggaggggagaggggagggaggaaggcgagagaaagggagctgcttccatcccggacttcccagagcctgcctggagcgcgtactcagcggctctcgggtcccagcgtcccagccgcggcccgcgctcctccgccccgctcctcctcctcctcttcctcctcctcctcctctctaggcacccccgtcccctccttccagcggctgcagcccccagccccaactctccgcgcttactcctgggacgcgcgtcctcgccccatcctttgcttccttccttccttccttcttccttcctcccctggctcccgccctccctctccaggtcgccctcccggggcccgattgtctcggtgccccgctcccggcccgcgccctgccccgtctctcccttgcacttcctgagtcgcccgccgccgccgtcgcagactcgccgcgggagccccagcccaacccgagcccgacagccactgccccggctccagctccagccccacagcccgcggcgcccgcccgagggagccccggcgcccggggaaggctccagtgggctagcgcgccctcgcccagccccgcgccccagccctgcccggcccggcgaggaaggaccgggaagatgaacaacggcggcaaagccgagaaggagaacaccccgagcgaggccaaccttcaggaggaggaggtccggaccctatttgtcagtggccttcctctggatatcaaacctcgggagctctatctgcttttcagaccatttaagggctatgagggttctcttataaagctcacatctaaacagcctgtaggttttgtcagttttgacagtcgctcagaagcagaggctgcaaagaatgctttgaatggcatccgcttcgatcctgaaattccgcaaacactacgactagagtttgctaaggcaaacacgaagatggccaagaacaaactcgtagggactccaaaccccagtactcctctgcccaacactgtacctcagttcattgccagagagccatatgagctcacagtgcctgcactttaccccagtagccctgaagtgtgggccccgtaccctctgtacccagcggagttagcgcctgctctacctcctcctgctttcacctatcccgcttcactgcatgcccagctctgtgaaggtcagactgtgaggagaagccaccccttgagcgctccgtctcctgatagtgccagcctggcctggtttcctgtttgatgcgctggctccctccctccgaggctacttctcagggctggaagtcccgtcagttctgctgaatactatgtcccaggtgtgtgatggcggctgcaatctgtcttgtgggtattaatgcaatcttcagtggtggctactgttctctagctgttctacaaaactggagcatgctggcttgaaaaacccttgcccagttttgatcccttcaagactttgtcacagcctctatcacacatctgtttttctcgaagaaaaaaatataattaataaaaatgttttactcttttacactgtataattgtaagaaatagcgtattatttgtgaatgcatggtctgaaatttctgtacagtttggagatattttcaaacgaaacgtaagagaagtcaacaataaaaccaagaaaagtgagtatttttataccaaacattttaagtatgctgggatggacgatcttacactggtttggatcacagtttttgttcttgacttttgaatgcttgtaattaaaaatatctatttttttcctctgaagtaagttgcatgtttgaggcatgtttccaaatattatcaaaatatcctgaattgtattgtgaatatatagaaatctgtgcctggccggagtccagggtaaattagtagcatggtgttagatgttagaaacagaactgttatttgcagtgttaggtctaggatcccagttctagtaggacagccctgcaagacaatcaaccagaagcctccaggagcttctacctatggcttattcacaactgggcaagaaaacatcattggtaagaactgctgagtgtgcccttagaaagccctagtagctccagctgtgactatatcaactgtgtgccaagtgtgactttgtacagttttatgtttccactctcctgtatgtgtagccactcgatgcctaacctaccttccacaagccagccccgcatccctgctcccgcagtgtaagtgcagagcctgcctcactggtaagggaaaaccttggcttgggaggccagccctggcccttgaaggggttggctgtgcccagcccacctggctgcagtgggcagctcatgtctgtatctccaaagtgatgtttgtttgcaaaacaccggctgaactgagctggtgttgccaactcttggcagcactgggccaaaccgaccacataccatgagctcccaaatggcgtgtgctcactgtgagacgtcctgccacaccccacaggagacggaggcagtgggcatttggaaccaattctattcagacttcgtcaaagccaaagtcagtctggtgttgtcagttgacacatctccagagttcatgacagctcaacctctccccttgtacagaagccatttttgtaaaaccacactgacctaaattcagctgccaaacacagtctttcctattgatccgctcggcttatgttgaaaatttcaatgtcatgattacctggttggtttgggtttttgttttgttattttccattagaaatataaagatgtcaagaagcttttaaaggtcaacacaaaaaaccaaggccaggagtgaggggctctttcttaccgtaaataaggggaaaaggcagttagctcaaggacttgtgacggatccactttggtgttcaaggacctgcttatgccctcagtgccaatcggctcttggtgagatgactgtactcctaaggaaaatagccacttctgcagtctattatgcttttataactgtttaaaggtacttttctat

SEQ ID NO: 507 - DNA, 1246 bp, Homo sapiens
aagactgggagcagtctcttaaacaaaagcaaaagaataagcttcgggcgctgtagtacctgccagctttcgccacaggaggctgccacctgtaggtcacttgggctccagctatgtggctgcctcttctgctgggtgccttactctgggcagtgctgtggttgctcagggaccggcagagcctgcccgccagcaatgcctttgtcttcatcaccggctgtgactcaggctttgggcgccttctggcactgcagctggaccagagaggcttccgagtcctggccagctgcctgaccccctccggggccgaggacctgcagcgggtggcctcctcccgcctccacaccaccctgttggatatcactgatccccagagcgtccagcaggcagccaagtgggtggagatgcacgttaaggaagcagggctttttggtctggtgaataatgctggtgtggctggtatcatcggacccacaccatggctgacccgggacgatttccagcgggtgctgaatgtgaacacaatgggtcccatcggggtcacccttgccctgctgcctctgctgcagcaagcccggggccgggtgatcaacatcaccagcgtcctgggtcgcctggcagccaatggtgggggctactgtgtctccaaatttggcctggaggccttctctgacagcctgaggcgggatgtagctcattttgggatacgagtctccatcgtggagcctggcttcttccgaacccctgtgaccaacctggagagtctggagaaaaccctgcaggcctgctgggcacggctgcctcctgccacacaggcccactatgggggggccttcctcaccaagtacctgaaaatgcaacagcgcatcatgaacctgatctgtgacccggacctaaccaaggtgagccgatgcctggagcatgccctgactgctcgacacccccgaacccgctacagcccaggttgggatgccaagctgctctggctgcctgcctcctacctgccagccagcctggtggatgctgtgctcacctgggtccttcccaagcctgcccaagcagtctactgaatccagccttccagcaagagattgtttttcaaggacaaggactttgatttatttctgcccccaccctggtactgcctggtgcctgccacaaaataagcactaacaaaagtgtattgtttaaaaaataaaaagaaggtgggcagaaatgtgcccagtggaaaaaaaaaaaaaaaaaa

SEQ ID NO: 508 - DNA, 2286 bp, Homo sapiens
gagtagcggaaagatctgctcgaggcctgggtgctttggtgtcggagatccgagagtcggagatcggagagtcggacacaggacagtcggacaccggacagtcaaacaccggagagttagactgggcttctcggtggggagaggctctgggataactactgttacagctttgaagggtcaagggaggattggccaccaaagcctgtttattagcagctgccatttgttgaaagaaatttggattattttagaaacaaatttggaaagaaaaagaatggcgtccgtttcagctctaactgaggaactggattctataaccagtgagctacatgcagtagaaattcaaattcaagaacttacggaaaggcaacaagagcttattcagaaaaaaaaagtcctgacaaagaaaataaagcagtgtttagaggattctgatgccggggcaagcaatgaatatgattcttcacctgccgcttggaataaagaagattttccatggtctggtaaagttaaagatattctgcaaaatgtctttaaactggaaaagttcagaccacttcagcttgaaactattaacgtaacaatggctggaaaggaggtatttcttgttatgcctacaggaggtggaaagagcttatgttaccagttaccagcattatgttcagatggttttacactcgtcatttgcccattgatctctcttatggaagaccaattaatggttttaaaacaattaggaatttcagcaaccatgttaaatgcttctagttctaaggagcatgttaaatgggttcatgctgaaatggtaaataaaaactccgagttaaagctgatttatgtgactccagagaaaattgcaaaaagcaaaatgtttatgtcaagactagagaaagcctatgaagcaaggagatttactcgaattgctgtggatgaagttcactgctgtagtcagtggggacatgatttcagacctgattataaggcacttggtatcttaaagcggcagttccctaacgcatcactaattgggctgactgcaactgcaacaaatcacgttttgacggatgctcagaaaattttgtgcattgaaaagtgttttacttttacagcttcttttaataggccaaatctatattatgaggttcggcagaagccctcaaacactgaagattttattgaggatattgtaaagctcattaatgggagatacaaagggcaatcaggaatcatatattgtttttctcagaaagactctgaacaagttacggttagtttgcagaatctgggaattcatgcaggtgcttaccatgccaatttggagccagaagataagaccacagttcatagaaaatggtcagccaatgaaattcaggtagtagtggcaactgttgcatttggtatgggaattgataagccagatgtgaggtttgttatccatcattcaatgagtaaatccatggaaaattattaccaagagagtggacgtgcaggtcgagatgacatgaaagcagactgtattttgtactacggctttggagatatattcagaataagttcaatggtggtgatggaaaatgtgggacagcagaagctttatgagatggtatcatactgtcaaaacataagcaaatgtcgtcgtgtgttgatggctcaacattttgatgaagtatggaactcagaagcatgtaacaaaatgtgcgataactgctgtaaagacagtgcatttgaaagaaagaacataacagagtactgcagagatctaatcaagatcctgaagcaggcagaggaactgaatgaaaaactcactccattgaaactgattgattcttggatgggaaagggtgcagcaaaactgagagtagcaggtgttgtggctcccacacttcctcgtgaagatctggagaagattattgcacactttctaatacagcagtatcttaaagaagactacagttttacagcttatgctaccatttcgtatttgaaaataggacctaaagctaaccttctgaacaatgaggcacatgctattactatgcaagtgacaaagtccacgcagaactctttcagggctgaatcgtctcaaacttgtcattctgaacaaggtgataaaaagatggaggaaaaaaattcaggcaacttccagaagaaggctgcaaacatgcttcagcagtctggttctaagaatacaggagctaagaaaagaaaaatcgatgatgcctgatatgaatgttactaaattttctaattaaagatggtttatgcaaaaaaaaaaaaaaaaaaaaa

SEQ ID NO: 509 - DNA, 2866 bp, Homo sapiens
gagtagcggaaagatctgctcgaggcctgggtgctttggtgtcggagatccgagagtcggagatcggagagtcggacacaggacagtcggacaccggacagtcaaacaccggagagttagactgggcttctcggtggggagaggctctgggataactactgttacagctttgaagggtcaagggtgtgcgctttttgtttcatccttccctttcctgctgcagggcgaggccggtctgtagcggatcacttcctttcgcccacacattggcggaggagaaaccggaaagttaatcactgccctgctctgagaactcgggcctttaggggcacgttcgcctgctgaccggtcttctgatctccccattcttttccatgcaggaggattggccaccaaagcctgtttattagcagctgccatttgttgaaagaaatttggattattttagaaacaaatttggaaagaaaaagaatggcgtccgtttcagctctaactgaggaactggattctataaccagtgagctacatgcagtagaaattcaaattcaagaacttacggaaaggcaacaagagcttattcagaaaaaaaaagtcctgacaaagaaaataaagcagtgtttagaggattctgatgccggggcaagcaatgaatatgattcttcacctgccgcttggaataaagaagattttccatggtctggtaaagttaaagatattctgcaaaatgtctttaaactggaaaagttcagaccacttcagcttgaaactattaacgtaacaatggctggaaaggaggtatttcttgttatgcctacaggaggtggaaagagcttatgttaccagttaccagcattatgttcagatggttttacactcgtcatttgcccattgatctctcttatggaagaccaattaatggttttaaaacaattaggaatttcagcaaccatgttaaatgcttctagttctaaggagcatgttaaatgggttcatgctgaaatggtaaataaaaactccgagttaaagctgatttatgtgactccagagaaaattgcaaaaagcaaaatgtttatgtcaagactagagaaagcctatgaagcaaggagatttactcgaattgctgtggatgaagttcactgctgtagtcagtggggacatgatttcagacctgattataaggcacttggtatcttaaagcggcagttccctaacgcatcactaattgggctgactgcaactgcaacaaatcacgttttgacggatgctcagaaaattttgtgcattgaaaagtgttttacttttacagcttcttttaataggccaaatctatattatgaggttcggcagaagccctcaaacactgaagattttattgaggatattgtaaagctcattaatgggagatacaaagggcaatcaggaatcatatattgtttttctcagaaagactctgaacaagttacggttagtttgcagaatctgggaattcatgcaggtgcttaccatgccaatttggagccagaagataagaccacagttcatagaaaatggtcagccaatgaaattcaggtagtagtggcaactgttgcatttggtatgggaattgataagccagatgtgaggtttgttatccatcattcaatgagtaaatccatggaaaattattaccaagagagtggacgtgcaggtcgagatgacatgaaagcagactgtattttgtactacggctttggagatatattcagaataagttcaatggtggtgatggaaaatgtgggacagcagaagctttatgagatggtatcatactgtcaaaacataagcaaatgtcgtcgtgtgttgatggctcaacattttgatgaagtatggaactcagaagcatgtaacaaaatgtgcgataactgctgtaaagacagtgcatttgaaagaaagaacataacagagtactgcagagatctaatcaagatcctgaagcaggcagaggaactgaatgaaaaactcactccattgaaactgattgattcttggatgggaaagggtgcagcaaaactgagagtagcaggtgttgtggctcccacacttcctcgtgaagatctggagaagattattgcacactttctaatacagcagtatcttaaagaagactacagttttacagcttatgctaccatttcgtatttgaaaataggacctaaagctaaccttctgaacaatgaggcacatgctattactatgcaagtgacaaagtccacgcagaactctttcagggctgaatcgtctcaaacttgtcattctgaacaaggtgataaaaagatggaggaaaaaaattcaggcaacttccagaagaaggctgcaaacatgcttcagcagtctggttctaagaatacaggagctaagaaaagaaaaatcgatgatgcctgatatgaatgttactaaattttctaattaaagatggtttatgcatgtatatgccattatttttgtagttagacaatagtttttaaaagaatttcatagatattttatatgtatggatctatattttcagagcttatctctgaagatctaaacttttgagaatgtttgaaaattagagatcatgaattatataattttccagtataaaacaagggaaaaatttttatgtaaaaccctttaaatgtaaaatatttgagaataagttcatacaatcgtcttaagttttttatgcctttatatacttagctatattttttcttttgacataactatctttttgaaagcaatattatactgacagaggctcactgagtgatactttaagttaaatatgtagatcaagggatgtccaatcttttggcttccctgagccagcgaattgtgcaca

SEQ ID NO: 510 - DNA, 5113 bp, Homo sapiens
agaaacgcttttctgcggtccagtctagggggtctcagattggcggggatgggcagcagcggcaggtggccttggcttttgctgcagccgtcaacgacctatcatcggggtcctgcgtaaggtccggctggctgggacttggctgtgggtgggatggactggctgccggaccgagtgccctgcagttggtaggagtatgaggcagagtgatgcacacccgggcgcccagcatcgttctaattgccggagacattgcctcagactgtgcgctgctagaggctgcgttcctgagcaggaagcccgtttcctgggattggaactacccttcttggccagcgggaagtccccaaggacggagtcgaaaggtcaaatcttatctgtcagtgctgtgtgacagcatcgcaacgggatctgcagaacctgaactcgatccgtaatgcctcctgcctgcctctttcaagatggaggtgaaacctgtgggagaacctactcaagaggtgtctaaattcaaactttccaccaaggtagaaagcacgggacactggctggtggaagatcatgttcgaatatgggaagttttaaagacagaggagagctcgattcaggactggggtgaagaggtagaggaaggagctgtttaccatgtcaccctcaaaagagtccagattcaacaggctgccaataaaggagcaagatggctaggggttgaaggggaccagctgcctccaggacacacagtcagtcaatatgaaacctgtaagatcaggaccataaaagctggcaccttggagaagcttgtggagaacctgctgacagcttttggggacaatgactttacctatatcagcatctttctttcaacgtacagaggctttgcctccactaaagaagtgctggaactactgctggacaggtatggaaacctgacaagcccaaactgtgaagaagatggaagccaaagttcatcagagtccaaaatggtgatcaggaatgcaatcgcttccatactaagggcctggcttgaccagtgtgcagaagacttccgagagccccctcacttcccttgcttacagaaactgctggattatctcacacggatgatgccgggctctgacccagaaagaagagcacaaaatcttcttgagcagtttcagaagcaagaagtggaaactgacaatgggcttcccaacacgatctccttcagcctggaagaggaagaggaactggagggtggagagtcagcagaattcacgtgcttctcagaagatctcgtggcagagcagctgacctacatggatgcacaactcttcaagaaagtagtgcctcaccactgcctgggctgcatttggtctcgaagggataagaaggaaaacaaacatttggctcctacgatccgtgccaccatctctcagtttaataccctcaccaaatgtgttgtcagcaccatcctggggggcaaagaactcaaaactcagcagagagccaaaatcattgagaagtggatcaacatcgctcatgaatgtagactcctgaagaatttttcctccttgagggccatcgtttcggcactgcagtctaattccatctatcggttaaaaaagacttgggctgccgtcccaagggaccgaatgctgatgtttgaagaactttcagatatcttctcagaccataataaccatttgaccagccgagaactactgatgaaggaaggaacctcaaaatttgcaaacctggacagcagtgtgaaagaaaaccagaagcgtacccagaggcggctgcagctccagaaggacatgggtgtgatgcagggaactgtgccctacctgggcaccttcctgactgacctgaccatgcttgacactgcccttcaggactacatcgagggtggactgataaactttgagaaaaggagaagggaatttgaagtgattgcccagataaagctcttacagtctgcctgcaacagctattgcatgaccccagaccaaaagttcatccagtggttccagaggcagcagctcctgacagaggaggagagctatgccctgtcatgtgagattgaagcagctgctgacgccagcaccacctcgcccaagcctcggaagagcatggtgaagagactcagcctactgtttctagggtctgacatgatcaccagtcccactcccaccaaagagcagcccaagtccactgccagcgggagctctggtgaaagcatggactctgtcagcgtgtcatcctgcgagtcgaaccactcagaggctgaggagggctccattactcccatggacacccctgatgagcctcaaaaaaagctctctgagtcctcctcatcctgttcttctatccattccatggacacaaattcctcagggatgtcttccttaatcaaccccctctcctcccctccgtcctgcaacaacaaccccaaaatccacaagcgctctgtctcggtgacgtccattacctcgactgtgctgcctcctgtttacaaccaacagaatgaagacacctgcataatccgcatcagtgtggaagacaataacggcaacatgtacaagagcatcatgttgacgagccaggataaaacccccgctgtgatccagagagccatgctgaagcacaatctggactcagaccccgccgaggagtacgagctggtgcaggtcatctcggaggacaaagaacttgtgattccagactcagcaaatgtcttttatgccatgaacagccaagtgaactttgacttcattttgcgcaaaaagaactccatggaagaacaagtgaaactgcgtagccggaccagcttgacgttgcccaggacagctaaacggggctgctggagtaacagacacagcaaaatcaccctctgaagggagggaccagtggccccttgtttgccaaaggcagagtggggctgagaaacaggctgcggtgattgcaattaccatccggtgttcgaggatcattggtgaagtcagcagatatttattgagttcctgtggtgtgcaaagcattatgataggcaccgtggggaaactggaaatgaatttgacatgaaaaggatgaacgattcactgattctctttgactcatttgagactaaaatgcagaattaccaacatttaaaacatatatatgcacatgtatttggtatgcatgtgtatctatataaaaatatataagagggactttatgggatagtatggactatggaaaaacaaatttgcacaatggcctgggaagttgaggtcactttttacagggaaatagaagaaactgagaacctagtctcgtatattctgagtaaatggaatcagtcctgggaatagagagtgtcctttgtgccagtattacaagaagcccaaactttatttttataaagggagaggatgactttctcaatcaagtgccaccagataaaaacaactgcagaggctggaactgccacaggctgtatgaaaggccactttggaaagggtttggatgagctggtggccttcaacctctgcctgcatctgccactttctgctaccctagggaggccaggaggagcttcggaggaccatcgccccactggtctagccatcatgacacctctggaggtgtcaagctcctgaaacaagctcatttcagtttctggcaaccccgtgtatttccgttttccccctaaagaacatatcataatcattgcacaaataaccatgttctttggtaatgaagccagaaaagaaagcgcaaaagaatggtgactcatttggactcttatctgtcttggaatgtcactgcttcattgccttctctgattgccttttgcatgtaaaactatgtgtctggagtcttttgccatctggatcttagtacctctttattatgtgcaatttattcctcaggtgtggaaatttctactgcaattgactacgtttgattattttgagcttgtgaaagatttctgaacagtgattgtcccgttaatagcccctcagaagatgttccctgctgataacagcatcctattttacttacttttatagcattactgtgcctagtcgtggggaaagagatggggctgtatagattatctgaatcatttgtctaagaggtacattcttccagatggaatcaataacttttttttttccaggttcccgtgcttgctatcacagtatcattgttaagtgacacttttgtctctcataacaccatcacactcttccttccaagtctgagctgtgctggggtttgaactaaaagccatatgtggaatattgacatgtgtaagaagcactttcagaatgttgtcctttttaagaaatgattctcaaaataccagtttttattccaaaaatttagagaacaaacccggaatatgaagtgcagattgtaacatggagctatttttttttcttaatcccataatacagctcctaaaagttgtgtgggatttgcgttgcataaatagccatgtgaattccacaagaagcaccagggaaagtttagagatttgcggcaatggaccgaagaacgggccaggaagtcctccaatttcctttggtctttccaggagattggactacacattgtaaagactgactgggtttcaactagtcaaaaagcactttcttctgttttcaatccctgttcgatttgtgcttctgtgcttgtaggagagatggccagggtggcagccctcatgcaggttgaagtatatgtagcctcagcctgatattcttggtgcgaaggtaaaaaaaaaaaaataaataaaaccattggcctggttgagggcgtgaccaccaagacatatatgttgtgcccgtgttcatcctgtgtatttatactgtatatgtagagtctagatttatatactgcaatgtaaaatatatatatatttaccttttttaaagacaatggaaattccaagtagctaaaacttagcttcatttatttaatgccactttaaatgtcttaaatttgtttcctggtggacagccgggtaatgcttttagctgctcgcatgcttgtctttctgcatctccatcatctgtttaccttttggttaaactaataaactagtttgggacttggctggcatgtgctgccagacccaaaggga

SEQ ID NO: 511 - DNA, 2158 bp, Homo sapiens
agttctgcatttctgcagagacagaaagaaacgcagctcttgacttcttttttgtaaacattactgtaagagttgtgataactttttattctactatgtatatgtatggaatagtattaataaatgaactagggaaggatgtaataaattagacatctcttcattttagagagaagatggaaacaacattgcttttcttttctcaaataaatatgtgtgaatcaaaagaaaaaacttttttcaagttaatacatggttcaggaaaagaagaaacaagcaaagaagccaaaatcagagctaaggaaaaaagaaatagactaagtcttcttgtgcagaaacctgagtttcatgaagacacccgctccagtagatctgggcacttggccaaagaaacaagagtctcccctgaagaggcagtgaaatggggtgaatcatttgacaaactgctttcccatagagatggactagaggcttttaccagatttcttaaaactgaattcagtgaagaaaatattgaattttggatagcctgtgaagatttcaagaaaagcaagggacctcaacaaattcaccttaaagcaaaagcaatatatgagaaatttatacagactgatgccccaaaagaggttaaccttgattttcacacaaaagaagtcattacaaacagcatcactcaacctaccctccacagttttgatgctgcacaaagcagagtgtatcagctcatggaacaagacagttatacacgttttctgaaatctgacatctatttagacttgatggaaggaagacctcagagaccaacaaatcttaggagacgatcacgctcatttacctgcaatgaattccaagatgtacaatcagatgttgccatttggttataaagaaaattgattttgctcatttttatgacaaacttatacatctgcttctaacatatcgcatgtttatgttaagatttggtcccatcctttaaactgaaatatgtcatgtgaaattattttaaaaatgtaaaaacaaaactttctgctaacaaaatacatacagtatctgccagtatattctgtaaaaccttctatttgatgtcattccatttataatcagaaaaaaaacttatttcttaatcaaaaggcagtacaaaaaaagtaataatgttttataagattgtagagttaagtaaaagttaagcttttgcaaagttgtcaaaagttcaaacaaaagtctagttgggattttttaccaaagcagcataatatgtgttatataaacataataatactcagatatccaaatgttcagatagcatttttcataatgaatgttctcttttttttggtaatagtgtagaagtgatctggttcttacaatgggagatgaagaacatttattattgggttactactaaccctgtcccaagaatagtaatatcacctctagttataagccagcaacaggaacttttgtgaagacacattcatctctacagaacttcagattaaatataatctagattaatgactgagaataagatccacatttgaactcattcctaagtgaacatggacgtacccagttatacaaagtacttctgttggtcacagaaacatgaccagattttgcatatctccaggtagggaactaagtagactaccttatcaccggctaagaaaacttgctactaaactattaggccatcaatggcttgaataaaaaccagagaaggtttttcccaggacgtctcatgtttggccctttagaattggggtagaaatcagaaatgagatgaggggaagaagcaaggagtctaaggccctagcgatttgggcatctgccacattggttcatattcagaaagtgttatctcattgattatattcttgttaagcaaatctccttaagtaattattattcaaataagattatactcatacatctatatgtcactgttttaaagagatatttaatttttaatgtgtgttacatggtctgtaaatatttgtatttaaaaatgccatgcattaggctttggaaatttaatgttagttgaaatgtaaaatgtgaaaactttagatcatttgtagtaataaatatttttaacttcattcatacagttaagtttatctgacaataaaagctctgactgaaaaaaaaaaaaaaa

SEQ ID NO: 512 - DNA, 1344 bp, Homo sapiens
aaacagccggggctccagcgggagaacgataatgcaaagtgctatgttcttggctgttcaacacgactgcagacccatggacaagagcgcaggcagtggccacaagagcgaggagaagcgagaaaagatgaaacggacccttttaaaagattggaagacccgtttgagctacttcttacaaaattcctctactcctgggaagcccaaaaccggcaaaaaaagcaaacagcaagctttcatcaagccttctcctgaggaagcacagctgtggtcagaagcatttgacgagctgctagccagcaaatatggtcttgctgcattcagggcttttttaaagtcggaattctgtgaagaaaatattgaattctggctggcctgtgaagacttcaaaaaaaccaaatcaccccaaaagctgtcctcaaaagcaaggaaaatatatactgacttcatagaaaaggaagctccaaaagagataaacatagattttcaaaccaaaactctgattgcccagaatatacaagaagctacaagtggctgctttacaactgcccagaaaagggtatacagcttgatggagaacaactcttatcctcgtttcttggagtcagaattctaccaggacttgtgtaaaaagccacaaatcaccacagagcctcatgctacatgaaatgtaaaagggagcccagaaatggaggacatttcattctttttcctgaggggaaggactgtgacctgccataaagactgaccttgaattcagcctgggtgttcaggaaacatcactcagaactattgattcaaagttgggtagtgaatcaggaagccagtaactgactaggagaagctggtatcagaacagcttccctcactgtgtacagaacgcaagaagggaataggtggtctgaacgtggtgtctcactctgaaaagcaggaatgtaagatgatgaaagagacaatgtaatactgttggtccaaaagcatttaaaatcaatagatctgggattatgtggccttaggtagctggttgtacatctttccctaaatcgatccatgttaccacatagtagttttagtttaggattcagtaacagtgaagtgtttactatgtgcaagggtattgaagttcttatgaccacagatcatcagtactgttgtctcatgtaatgctaaaactgaaatggtccgtgtttgcattgttaaaaatgatgtgtgaaatagaatgagtgctatggtgttgaaaactgcagtgtccgttatgagtgccaaaaatctgtcttgaaggcagctacactttgaagtggtctttgaatacttttaataaatttattttgataaataatattg

SEQ ID NO: 513 - DNA, 1559 bp, Homo sapiens
ctagtaaaaatgcatttttatagagatgttgggaaaggcttcttgaaattacacgtgggacttttaatagataggcgctttgaccagctaagcaacagggctcccctcgtgtgggacttttagaatgtagcaaccactgacacgcagggaaggattatgcgatcaggtgagaaggtggccgaccctgactggctggaagcagatgcattctggtagttgattggtccacaggtagcgtgacgcttgtcacgtcctcagcctcccagcattcaatcgtagcctttcggacagctcgaagcccttctgtggagagctcgaagccttctgtggagaactcaaagccgtccgtggagccccagacgagccaaagcccaccttctcctcagcctgagctgtcttgaagatgagtaagagtgggtttgggagctatggcagcatttctgctgctgatggagcgagtggaggcagtgaccaactgtgtgagagagatgcaactcctgctattaagacccaaagacctaaggtccgaattcaggacgttgtaccgtgtaacgtgaaccagcttctcagctctactgtgtttgaccctgtgttcaaggttaggggaattatagtttcccaggtctccatcgtgggggtaatcagaggggcagagaaggcttcaaatcacatttgttacaaaattgatgatatgaccgcgaaaccaatcgaggcccgacagtggtttggtagagagaaagtcaagcaggtgactccattgtcagtcggagtatatgtcaaagtgtttggtatcctcaaatgtcccacgggaacaaagagccttgaggtattgaaaattcatgtcctagaggacatgaacgagttcaccgtgcatattctggaaacggtcaatgcacacatgatgctggataaagcccgtcgtgataccactgtagaaagtgtgcctgtgtctccatcagaagtgaatgatgctggggataacgatgagagtcaccgcaatttcatccaggacgaagtgctgcgtttgattcatgagtgtcctcatcaggaagggaagagcatccatgagctccgggctcagctctgcgaccttagcgtcaaggccatcaaggaagcgattgattatctgaccgttgagggccacatctatcccactgtggatcgggagcattttaagtctgctgattgaggcagggaaaacatcctttcatttttcgaagacccttgcatccagctgtgagtaattttgacctgttgactttttaggagtaggactaaaaaaaaaaatctcaagtggcattctttgtcaactcgctgcttttctaactgctttgaacttttcggattttctgtatttgaagctcagagagagacggtgatggataaattgacaactctgtaggatttactagcaagctaatggaaacatgattttcggggaagaaaaactacagaaaatgtagaaatttattatttaattgtgttggagcttctttttccaaaagaaaaactagttgcagtcagggagccagcgaaaagacaaaaaaaaaaaaaaaaaa

SEQ ID NO: 514 - DNA, 3327 bp, Homo sapiens
ggaagaggaggggggagaaggaggagctgaagcgggaagagcggcaggcagcggctcggcggagttgcagcagaggcggcggcgacgctgagacaccgcagcttccctgagcgccgagtccctccggggacagcagcagggagcgcccgcgcagccaccgagcctctgcccagccaagccgccgtcgccgcgccgggggaccgccagccatggccgcgccgggggatccgcaggacgagctgctgccgctggccggccccgggtcccagtggctcaggcaccggggggagggggagaacgaagcggtgacgccgaaaggggccacgccggcgccgcaggctggggagcccagcccggggttgggcgccagggcccgggaagcggcgtcgcgggaagccggctcgggccccgcccggcagtcgcccgttgccatggaaactgcatccacaggtgtggcaggtgtttccagtgccatggaccacaccttctcaacaacatcaaaagatggggaaggatcgtgttacacatctctcatttctgacatctgctatccacctcaggaggattctacatattttactggaattcttcagaaggaaaatggccacgtcaccatttcagagagccctgaggagctgggtacacccggcccctccttaccagatgtgcctgggatagagtctcgtggcttatttagttctgattctggaatagagatgactcctgcagagtccacggaagtgaacaagatcttagcagaccctctggaccagatgaaagcagaggcctataaatacattgacataaccagacccgaggaggtgaagcaccaagaacaacatcaccccgagctggaagataaagacttggactttaagaataaagacactgacatctcaattaaacctgaaggagtccgtgaacctgacaaaccagctcctgtggagggaaaaatcatcaaggaccatttattggaagaatccacatttgctccatacatagatgatctctctgaagaacagcgcagggctcctcagatcaccacccctgtcaaaatcacactgacggaaatagaaccttctgttgaaaccactacccaagagaagacccctgagaagcaagatatatgtctaaagccaagtcctgacacagtccccactgtcactgtctcggagcctgaagacgacagcccaggatctatcacccctccatcttctggaacagaaccatctgctgcagaatcccaggggaaaggcagcatctccgaggatgagctgatcaccgccatcaaagaagcaaagggattatcgtatgaaaccgccgagaacccacggccggtgggccagctggccgacaggcccgaggtcaaggccaggtccggaccgccaaccatccccagccccctggaccacgaggccagcagcgcggagtcgggggactcagagatcgagctggtgtccgaggaccccatggccgcggaggacgcgctgccctcaggctatgtgagctttggccacgtgggcggcccgccgccctcgcccgcctcgccatccatccagtacagcatcctgagggaggagcgcgaggccgagctggacagcgagctcatcatcgagtcgtgcgacgcctcctcggcctcggaggagagccccaagcgggagcaggactcacccccgatgaagcccagcgccctggatgccatccgggaggagactggcgtccgggccgaggagcgtgcgccaagccggcggggcctggccgagccgggttccttcctcgactacccctcaactgagccccagcctggccccgagctgccccctggagacggagccctggagcctgagacgcccatgttgccacggaagcctgaagaagactcgagttccaaccaaagtcctgcggccacaaagggccctgggcctctaggtcctggcgccccgcccccactgctgtttctcaataagcaaaaagctattgacctgttgtattggcgggacatcaagcagacgggcatcgtgtttgggagtttcctgctgctgctcttctccctgacccagttcagcgtggtgagcgtcgtggcctacctggccctggccgcactctcagccaccatcagtttccgcatctacaagtctgttttacaagcagtgcagaaaaccgacgaaggccaccctttcaaggcctacttggagcttgagatcaccctttctcaggagcagattcagaagtacacggactgcctgcagttctacgtgaacagcacacttaaggaactgaggaggctcttccttgtccaggacctggtggattccttaaaatttgcagtcctgatgtggctcctgacctacgttggcgctctcttcaatggcctgaccctgctgctcatggctgtggtttcaatgtttactctacctgtagtgtatgttaagcaccaggcacagattgaccaatatctgggacttgtgaggactcacataaatgctgttgtggcaaagattcaggctaaaatcccaggcgctaagaggcacgctgagtaaactgatttcccaccggggactggacacaaacaggaatgtctggagtggtaacagctctcttcttactcattactgcaaattgattgtctttcccccctccctccagtaccataatcttagagacaaaccttaaaacagctgtttttaggctgttccttgtactcttaggatatttgagtcacttgtgtcaaccactaaagtatagagaaaagtgtattagatgtggtttttaattttgtgttgctaaaaaaagtgcatgatggtgagagcccaagttatctttccctcttcggtgttcttcttctcttctctgcaatgcttctgtagcttctaatgttccccgtggctaggcctttcctgccgagtgctctgatgcaatagtggaaatcgcttatatgtccttgggttgctggttggattaatctttaataacaatatatagaattgtagactgatgttttagcatttttccaacacacacaacgtaaaaataaaagcagtcgaccgcacttatggtaatcagttttgtataacttaaaataattaaataaatgaataaatccaaaacaaacatgcagtacttttgttgtatgggattggtgggctgatttacatgtatggttactaaaaagtaccagcatgttaactttattacaatttgtattactttctctgtagttcctaatggattcaattacggactctggatatttgcacttatgtacttgatactgaatgcataaataaatgttactaaatgtagaatgttaaaaaaaaaaaaaaaaaa

SEQ ID NO: 515 - DNA, 1710 bp, Homo sapiens
cccgtctccagggtagcacccttgggcagcccagccaacgctgtcgcgtggagcggcgcccgcatccccatgcgcgcaggcggctccggggccgcgccgcgctgattcgctgccggccgcgcagactgcggcgccagcgacgctcccgcccctcaccgcgcgccgcctggtgcagcctcagtctctccgcagccgcgcggccactgcgagcccagccgcagcagccgggcaccaacgcttgagtgcacgctcggcgcccccgaggagagccacggcgagcccccaaagcccgcacgatgcaggccactgccgattccaccaagatggactgtgtgtggagcaactggaaaagtcaggctattgacctgttgtattggcgggacatcaagcagacgggcatcgtgtttgggagtttcctgctgctgctcttctccctgacccagttcagcgtggtgagcgtcgtggcctacctggccctggccgcactctcagccaccatcagtttccgcatctacaagtctgttttacaagcagtgcagaaaaccgacgaaggccaccctttcaaggcctacttggagcttgagatcaccctttctcaggagcagattcagaagtacacggactgcctgcagttctacgtgaacagcacacttaaggaactgaggaggctcttccttgtccaggacctggtggattccttaaaatttgcagtcctgatgtggctcctgacctacgttggcgctctcttcaatggcctgaccctgctgctcatggctgtggtttcaatgtttactctacctgtagtgtatgttaagcaccaggcacagattgaccaatatctgggacttgtgaggactcacataaatgctgttgtggcaaagattcaggctaaaatcccaggcgctaagaggcacgctgagtaaactgatttcccaccggggactggacacaaacaggaatgtctggagtggtaacagctctcttcttactcattactgcaaattgattgtctttcccccctccctccagtaccataatcttagagacaaaccttaaaacagctgtttttaggctgttccttgtactcttaggatatttgagtcacttgtgtcaaccactaaagtatagagaaaagtgtattagatgtggtttttaattttgtgttgctaaaaaaagtgcatgatggtgagagcccaagttatctttccctcttcggtgttcttcttctcttctctgcaatgcttctgtagcttctaatgttccccgtggctaggcctttcctgccgagtgctctgatgcaatagtggaaatcgcttatatgtccttgggttgctggttggattaatctttaataacaatatatagaattgtagactgatgttttagcatttttccaacacacacaacgtaaaaataaaagcagtcgaccgcacttatggtaatcagttttgtataacttaaaataattaaataaatgaataaatccaaaacaaacatgcagtacttttgttgtatgggattggtgggctgatttacatgtatggttactaaaaagtaccagcatgttaactttattacaatttgtattactttctctgtagttcctaatggattcaattacggactctggatatttgcacttatgtacttgatactgaatgcataaataaatgttactaaatgtagaatgttaaaaaaaaaaaaaaaaaa

SEQ ID NO: 516 - DNA, 2148 bp, Homo sapiens
cgtgtgtgtgcctccgtggctctccttcgctctgtgggacgacagaaccatctgctgcagaatcccaggggaaaggcagcatctccgaggatgagctgatcaccgccatcaaagaagcaaagggattatcgtatgaaaccgccgagaacccacggccggtgggccagctggccgacaggcccgaggtcaaggccaggtccggaccgccaaccatccccagccccctggaccacgaggccagcagcgcggagtcgggggactcagagatcgagctggtgtccgaggaccccatggccgcggaggacgcgctgccctcaggctatgtgagctttggccacgtgggcggcccgccgccctcgcccgcctcgccatccatccagtacagcatcctgagggaggagcgcgaggccgagctggacagcgagctcatcatcgagtcgtgcgacgcctcctcggcctcggaggagagccccaagcgggagcaggactcacccccgatgaagcccagcgccctggatgccatccgggaggagactggcgtccgggccgaggagcgtgcgccaagccggcggggcctggccgagccgggttccttcctcgactacccctcaactgagccccagcctggccccgagctgccccctggagacggagccctggagcctgagacgcccatgttgccacggaagcctgaagaagactcgagttccaaccaaagtcctgcggccacaaagggccctgggcctctaggtcctggcgccccgcccccactgctgtttctcaataagcaaaaagctattgacctgttgtattggcgggacatcaagcagacgggcatcgtgtttgggagtttcctgctgctgctcttctccctgacccagttcagcgtggtgagcgtcgtggcctacctggccctggccgcactctcagccaccatcagtttccgcatctacaagtctgttttacaagcagtgcagaaaaccgacgaaggccaccctttcaaggcctacttggagcttgagatcaccctttctcaggagcagattcagaagtacacggactgcctgcagttctacgtgaacagcacacttaaggaactgaggaggctcttccttgtccaggacctggtggattccttaaaatttgcagtcctgatgtggctcctgacctacgttggcgctctcttcaatggcctgaccctgctgctcatggctgtggtttcaatgtttactctacctgtagtgtatgttaagcaccaggcacagattgaccaatatctgggacttgtgaggactcacataaatgctgttgtggcaaagattcaggctaaaatcccaggcgctaagaggcacgctgagtaaactgatttcccaccggggactggacacaaacaggaatgtctggagtggtaacagctctcttcttactcattactgcaaattgattgtctttcccccctccctccagtaccataatcttagagacaaaccttaaaacagctgtttttaggctgttccttgtactcttaggatatttgagtcacttgtgtcaaccactaaagtatagagaaaagtgtattagatgtggtttttaattttgtgttgctaaaaaaagtgcatgatggtgagagcccaagttatctttccctcttcggtgttcttcttctcttctctgcaatgcttctgtagcttctaatgttccccgtggctaggcctttcctgccgagtgctctgatgcaatagtggaaatcgcttatatgtccttgggttgctggttggattaatctttaataacaatatatagaattgtagactgatgttttagcatttttccaacacacacaacgtaaaaataaaagcagtcgaccgcacttatggtaatcagttttgtataacttaaaataattaaataaatgaataaatccaaaacaaacatgcagtacttttgttgtatgggattggtgggctgatttacatgtatggttactaaaaagtaccagcatgttaactttattacaatttgtattactttctctgtagttcctaatggattcaattacggactctggatatttgcacttatgtacttgatactgaatgcataaataaatgttactaaatgtagaatgttaaaaaaaaaaaaaaaaaa

SEQ ID NO: 517 - DNA, 428 bp, Homo sapiens
atgtctcttgtcagctgtctttcagaagacctggtggggcaagtccgtgggcatcatgttgaccgagctggagaaagccttgaactctatcatcgacgtctaccacaagtactccctgataaaggggaatttccatgccgtctacagggatgacctgaagaaattgctagagaccgagtgtcctcagtatatcaggaaaaagggtgcagacgtctggttcaaagagttggatatcaacactgatggtgcagttaacttccaggagttcctcattctggtgataaagatgggcgtggcagcccacaaaaaaagccatgaagaaagccacaaagagtagctgagttactgggcccagaggctgggcccctggacatgtacctgcagaataataaagtcatcaatacctcaaaaaaaaaaaaaaaaaaaaa

SEQ ID NO: 518 - DNA, 510 bp, Homo sapiens
tgaggctgccttataaagcaccaagaggctgccagtgggacattttctcggccctgccagcccccaggaggaaggtgggtctgaatctagcaccatgacggaactagagacagccatgggcatgatcatagacgtcttttcccgatattcgggcagcgagggcagcacgcagaccctgaccaagggggagctcaaggtgctgatggagaaggagctaccaggcttcctgcagagtggaaaagacaaggatgccgtggataaattgctcaaggacctggacgccaatggagatgcccaggtggacttcagtgagttcatcgtgttcgtggctgcaatcacgtctgcctgtcacaagtactttgagaaggcaggactcaaatgatgccctggagatgtcacagattcctggcagagccatggtcccaggcttcccaaaagtgtttgttggcaattattcccctaggctgagcctgctcatgtacctctgattaataaatgcttatgaaatga

SEQ ID NO: 519 - DNA, 2701 bp, Homo sapiens
gagcctgcgcaggaggccaataggctgccaatactccttggactccccgccagggccctgctgtcagtgcgcctgcgcgcgggtccggcgccgaggttcttgactgctgtgccggacgccaggtgtagccatgcagcgagccgattccgagcagccctccaagcgtccccgttgcgatgacagcccgagaaccccctcaaacaccccttccgcagaggcagactggtccccgggcctggaactccatcccgactacaagacatggggtccggagcaggtgtgctccttcctcaggcgcggtggctttgaagagccggtgctgctgaagaacatccgagaaaatgaaatcacaggcgcattactgccttgtcttgatgagtctcgttttgaaaatcttggagtaagttccttgggggagaggaagaagctgcttagttatatccagcgattggttcaaatccacgttgatacaatgaaggtaattaatgatcctatccatggccacattgagctccaccctctcctcgtccgaatcattgatacacctcaatttcaacgtcttcgatacatcaaacagctgggaggtggttactatgtttttccaggagcttcacacaatcgatttgagcatagtctaggggtggggtatctagcaggatgtctagttcacgcactgggtgaaaaacaaccagagctgcagataagtgaacgagatgttctctgtgttcagattgctggactttgtcatgatctcggtcatgggccattttctcacatgtttgatggacgatttattccacttgctcgcccggaggtgaaatggacgcatgaacaaggctcagttatgatgtttgagcaccttattaattctaatggaattaagcctgtcatggaacaatatggtctcatccctgaagaagatatttgctttataaaggaacaaattgtaggaccacttgaatcacctgtcgaagattcattgtggccatataaagggcgtcctgaaaacaaaagcttcctttatgagatagtatctaataaaagaaatggcattgatgtggacaaatgggattattttgccagggactgccatcatcttggaatccaaaataattttgattacaagcgctttattaagtttgcccgtgtctgtgaagtagacaatgagttgcgtatttgtgctagagataaggaagttggaaatctgtatgacatgttccacactcgcaactctttacaccgtagagcttatcaacacaaagttggcaacattattgatacaatgattacagatgctttcctcaaagcagatgactacatagagattacaggtgctggaggaaaaaagtatcgcatttctacagcaattgacgacatggaagcctatactaagctgacagataacatttttctggagattttatactctactgatcccaaattgaaagacgcacgagagattttaaaacaaattgaataccgtaatctattcaagtatgtgggtgagacgcagccaacaggacaaataaagattaaaagggaggactatgaatctcttccaaaagaggttgccagtgctaaacccaaagtattgctagacgtgaaactgaaggctgaagattttatagtggatgttatcaacatggattatggaatgcaagaaaagaatccaattgatcatgttagcttctattgtaagactgcccccaacagagcaatcaggattactaaaaaccaggtttcacaacttctgccagagaaatttgcagagcagctgattcgagtatattgtaagaaggtggacagaaagagtttgtatgccgcaagacaatattttgttcagtggtgtgcagacagaaatttcaccaagccgcaggatggcgatgttatagccccactcataacacctcaaaaaaaggaatggaacgacagtacttcagtccaaaatccaactcgcctccgagaagcatccaaaagcagagtccagctttttaaagatgacccaatgtgaatgtctgtagtcagttgtttacaaactccctctcctgcacaattcatttagaggcttcaatcatagaattctgcaaattaatgacaactcatgctttaattttgtattttgaatgtacacgcatgctgaagctaagtaacttttaatcaaagaaataagatggtattaggcaaatcttactatactatgaaaagcattaccttgcctatttttaatattattaaagcctttctccttcagtagtctattttcttagaataacaactcttttatctattctgaactctattttttttcttttttaagagacaaggttttgctctgttgcccagcttggactcgaactttcctgggctcaagcgaccctcctgcctcagccccccaagtagctgggactaaagtcatgtgccaccacacccagcttactctgaacttttatgacagatgattgttttttgtttttaatgtagaaatgagacaagggtacaaattggaactagaaattgacattgtcattgacaaacatggctaaaaacaaaacatcaaatcctgcccccgtgaagagttccctgtcacctcaagtttgaggatagtcctctaagagtgacctaagcataagtgaaagacacctcccctcacccttctagccccctacaaggtgccaggttggggtaaagagttggagatgat

SEQ ID NO: 520 - DNA, 2490 bp, Homo sapiens
ggcgcagcggctccctataagcagaggagctgtccgtgtgctgaaacggcccgagaagctcgcccggagaacggggaggaatatgctgtggagctcctctgccatataaacaaaaagaggaaatctttcaaacatggctgaagcaaagacccactggcttggagcagccctgtctcttatccctttaattttcctcatctctggggctgaagcagcttcatttcagagaaaccagctgcttcagaaagaaccagacctcaggttggaaaatgtccaaaagtttcccagtcctgaaatgatcagggctttggagtacatagaaaacctccgacaacaagctcataaggaagaaagcagcccagattataatccctaccaaggtgtctctgtcccccttcagcaaaaagaaaatggcgatgaaagccacttgcccgagagggattcactgagtgaagaagactggatgagaataatactcgaagctttgagacaggctgaaaatgagcctcagtctgcaccaaaagaaaataagccctatgccttgaattcagaaaagaactttccaatggacatgagtgatgattatgagacacagcagtggccagaaagaaagcttaagcacatgcaattccctcctatgtatgaagagaattccagggataacccctttaaacgcacaaatgaaatagtggaggaacaatatactcctcaaagccttgctacattggaatctgtcttccaagagctggggaaactgacaggaccaaacaaccagaaacgtgagaggatggatgaggagcaaaaactttatacggatgatgaagatgatatctacaaggctaataacattgcctatgaagatgtggtcgggggagaagactggaacccagtagaggagaaaatagagagtcaaacccaggaagaggtgagagacagcaaagagaatatagaaaaaaatgaacaaatcaacgatgagatgaaacgctcagggcagcttggcatccaggaagaagatcttcggaaagagagtaaagaccaactctcagatgatgtctccaaagtaattgcctatttgaaaaggttagtaaatgctgcaggaagtgggaggttacagaatgggcaaaatggggaaagggccaccaggctttttgagaaacctcttgattctcagtctatttatcagctgattgaaatctcaaggaatttacagatacccccagaagacttaattgagatgctcaaaactggggagaagccgaatggatcagtggaaccggagcgggagcttgaccttcctgttgacctagatgacatctcagaggctgacttagaccatccagacctgttccaaaataggatgctctccaagagtggctaccctaaaacacctggtcgtgctgggactgaggccctaccagacgggctcagtgttgaggatattttaaatcttttagggatggagagtgcagcaaatcagaaaacgtcgtattttcccaatccatataaccaggagaaagttctgccaaggctcccttatggtgctggaagatctagatcgaaccagcttcccaaagctgcctggattccacatgttgaaaacagacagatggcatatgaaaacctgaacgacaaggatcaagaattaggtgagtacttggccaggatgctagttaaataccctgagatcattaattcaaaccaagtgaagcgagttcctggtcaaggctcatctgaagatgacctgcaggaagaggaacaaattgagcaggccatcaaagagcatttgaatcaaggcagctctcaggagactgacaagctggccccggtgagcaaaaggttccctgtggggcccccgaagaatgatgataccccaaataggcagtactgggatgaagatctgttaatgaaagtgctggaatacctcaaccaagaaaaggcagaaaagggaagggagcatattgctaagagagcaatggaaaatatgtaagctgctttcattaattaccctactttcattcctcccaccccaagcaaatcccaacatttctcttcagtgtgttgacttctatcctgttaacactgtaatatctttaaatgatgtacaggcagatgaaaccaggtcactggggagtctgcttcatttcctctgagctgttatcttgtgtatggatatgtgtaaatgttatgactccttgataaaaaatttattatgtccattattcaagaaagatatctatgactgtgtttaatagtatatctaatggctgtggcattgttgatgctcacatatgataaaaaagtgtcctataattctattgaaagtttttaatatttattgaattattttgttactgtctgtagtgttttgtggagtactggaccaaaaaaataaagcattataaatatatagttttatttataaggccttttctattgtgtgttttactgttgattaataaatgttatttctggacaaaaaaaaaaaaaaaa

SEQ ID NO: 521 - DNA, 1519 bp, Homo sapiens
ctgggccgagccctcccggtcggctaagattgctgaggaggcggcgggtagctggcaggcgccgacttccgaaggccgccgtccgggcgaggtgtcctcatgacttctcttgtggaccatgtccgtgatcttttttgcctgcgtggtacgggtaagggatggactgcccctctcagcctctactgatttttaccacacccaagattttttggaatggaggagacggctcaagagtttagccttgcgactggcccagtatccaggtcgaggttctgcagaaggttgtgactttagtatacatttttcttctttcggggacgtggcctgcatggctatctgctcctgccagtgtccagcagccatggccttctgcttcctggagaccctgtggtgggaattcacagcttcctatgacactacctgcattggcctagcctccaggccatacgcttttcttgagtttgacagcatcattcagaaagtgaagtggcattttaactatgtaagttcctctcagatggagtgcagcttggaaaaaattcaggaggagctcaagttgcagcctccagcggttctcactctggaggacacagatgtggcaaatggggtgatgaatggtcacacaccgatgcacttggagcctgctcctaatttccgaatggaaccagtgacagccctgggtatcctctccctcattctcaacatcatgtgtgctgccctgaatctcattcgaggagttcaccttgcagaacattctttacaggttgcccatgaggaaattggaaacattctggcttttcttgttcctttcgtagcctgcattttccaggatccaaggagctggttctgctggttggaccaaacctcgtgagccagccacccctgacccaaatgaggagagctctgattctcccatccgggagcagtgatgtcaaacttctgctgctggggaaatctcatcagcagggagcctgtggaaaagggcatgtcagtgaaatctgggaatggctggattcggaaacatctgcccatgtgtattgatggcagagctgttgcccacaagcgccttttatttagggtaaaattaacaaatccattctattcctctgacccatgcttagtacatatgacctttaacccttacatttatatgattctggggttgcttcagaagtgttatttcatgaatcattcatatgatttgatcccccaggattctattttgtttaatgggcttttctactaaaagcataaaatactgaggctgatttagtcagggcaaaaccatttactttacatattcgttttcaatacttgctgttcatgttacacaagcttcttacggttttcttgtaacaataaatattttgagtaaataatgggtacattttaacaaactcagtagtacaacctaaacttgtataaaagtgtgtaaaaatgtatagccatttatatcctatgtataaattaaatgaggtggcttcagaaatggcagaataaatctaaaaaaaaaaaaaaa

SEQ ID NO: 522 - DNA, 3988 bp, Homo sapiens
tgcaactccgagcgtgagtccaggctaaggggacgccggccggggaagaggcgcggcgggagaagcgaccgcagcgggagcccggccaccgagggctgccggcactaggcgcagagccgccagcgctcggaagcccgcggggtgcgggagcgggaacagacttcttttgtagaattatcctatggaatgatattttcataatgagtcaacaaggttacgtggctacacctccgtattctcagcctcagcctggaataggcctttctccacctcattatgggcactatggggatccgtcgcacacagcatctccaacaggtatgatgaagccagcagggcctttgggggccaccgccactaggggaatgttgcctccgggtcccccacctcctggaccccatcagtttggtcagaatggagctcatgccactggtcaccctccccaaagatttccaggccctccacctgtcaacaatgtggcatcctcacatgcaccataccaaccctctgcacaatcttcttatccaggtcctatatccacttcatctgtcacccagctgggcagccagctcagtgctatgcaaatcaacagctatggttcaggcatggctcctccaagccagggaccccctggccctctgtcagccacatcattgcagactcctccacgacctccacagccttccattttgcagcctggatctcaagttcttccaccaccacccaccacactcaatggtcctggtgcctcacctttgcctctaccaatgtacagaccagatgggctctctgggcctcctcctccaaatgcccagtaccagcccccacctcttccaggccagaccttgggtgctggatatcctccgcagcaggccaactctggtccccagatggcaggcgcacaactgtcttacccaggaggcttccctggaggtcctgcacagatggctggtccgccacagccccagaagaagctggatcctgactctatccctagcccaatccaggtgattgagaatgatagagccagcagaggaggacaagtttatgccaccaacaccagaggccagatccctcccctggtcactacagattgcatgatacaagaccaaggaaatgccagtcctcgattcatccgttgtacaacatactgttttccatgcacgtcagatatggctaagcaagctcagattccattagctgctgtcatcaagccctttgccaccattccttcaaatgagagtcccctttacttggtaaatcacggcgagagtggaccagtcagatgcaacaggtgcaaggcctacatgtgcccatttatgcagttcatcgaaggaggaaggagatatcagtgtggattttgcaactgtgtgaatgatgttccaccattctatttccaacatctggaccacattggaagaagactggaccactatgagaaaccagagttatctctaggatcttatgaatatgttgccactttggattattgcagaaagagtaagcctcccaacccaccagcctttatcttcatgattgatgtttcatatagtaacataaagaatggacttgtcaagctcatatgtgaagaactgaagaccatgctggaaaaaattccaaaggaagagcaagaagagacgtctgcaattcgagtgggttttatcacatataacaaagttctccatttctttaatgtgaagagtaatctggcccagcctcagatgatggtggtgactgatgttggagaagtctttgttcctttgttggatggtttccttgtcaactatcaagaatcccaatctgtgattcataatttgttggaccagattccagacatgtttgcagactctaatgaaaatgagactgtctttgcttctgtcatccaggctggcatggaagcactaaaggcagcagactgtcctgggaagctgttcatcttccattcttccttgccaactgctgaagcaccagggaagctcaaaaacagagatgacaaaaaactggttaatacagacaaagagaagatacttttccagccccaaacaaatgtctatgactcattggccaaggactgcgtggctcacggctgctctgtgacactcttcctctttcctagtcagtatgtggacgtggcctcgctggggctggttcctcagctcactggaggaaccctttacaaatacaacaatttccagatgcacttggatagacaacaatttttgaacgacctcagaaatgatattgaaaagaaaataggctttgatgctattatgagggttcgtaccagcacaggtttcagagccactgatttctttggtggaatcttgatgaacaacaccaccgatgtagaaatggctgccatcgattgtgacaaggcagtgaccgtggagttcaagcacgatgacaaactcagtgaagacagtggagccttaatccagtgtgctgtgctttacacgacaatcagtggtcaaagaagacttcggattcacaatcttggcttaaactgcagctctcagctagctgatctttataagagctgtgagacagatgctcttatcaacttctttgccaagtcagcttttaaagcagttctccaccagcctttgaaggtcatccgggaaattctagttaatcagactgcccatatgttggcatgttaccggaagaattgtgcaagtccttctgcagcaagccagcttattctaccagattccatgaaagtattgccagtgtacatgaattgcttgttgaaaaactgtgtactactcagcagaccagagatctcaactgatgaacgagcataccagagacagctggtcatgaccatgggtgtggctgactctcagcttttcttctacccacaacttctgcccatacacacgttagatgtcaagagtacaatgttacctgctgccgttcgttgctctgagtcccgtctttcagaagaaggaatattcttactggctaatggtctacacatgttcctgtggttgggagtaagcagcccaccagaactgatccaaggaatatttaatgtgccatcttttgcacatatcaacacagatatgacattgctgcctgaagtgggaaacccatactctcaacaactcagaatgataatgggtattatccaacaaaagaggccatattcaatgaagctcacaattgtaaagcagcgagaacaaccagaaatggttttccgacagttcctggtagaagacaaaggactttacggaggctcttcttatgtggatttcctttgttgtgttcacaaggagatctgtcagctgcttaattaattgaaacttctctgtcattgatgttgcatttccaaggagataatctccttcttggtgcctaattttctagatgataataggctagttttgatttcttgctcattttcagaataactttccaggaagagatggcatttagaacttcagctttggtgctcaggtataaagccaattaaggtacaattgtaccataaagggaacaatctgtttctgattgcacagtttctaatttttaaaactgatgtggtttgcatttcataaaaggcaaagtttacagaaccataaacattctcaattttctttatgctagacatataaattatttttcaaactgtatagatttggggtaaaaagttgtctcagttcctctcccaattgcaatgagaaaaaaaagcttaatttttacattatacttaattttctaaaaccatgtaactccattgaacatttttcaacttaaggtctgcatagcagacttttaataaccttgggatttatctggtagaacaatatgtgttctacatttttttcataattatatattgtgtatgttaaaactattttccagttgttttgtctgtaaaactgtctttatcaatatgcttaatggttctttgtacaattttgaaagtttctacctgtatataatggatgttaaccagtatcaataaatcacttcgtataatctt

SEQ ID NO: 523 - DNA, 4675 bp, Homo sapiens
gctgtaacactcaccgtgaaggtctgcagcttcactcccgagccagcgagaccacgaacccaccagaaggaagaaactctgaacacatctgaacatcagaagggacagactccagacgcgccaccactctgctaacaccagatagtggaaagaaaccatgtgctgaaatgtttgacgacactgatggtttgactctgctaactggaatggcttattgtgcaagaaagtacacctggtcgggtcctggggctcatctctagcaccagcaaagatttctgaagacgtctttctagaaatgactggaaagtttcaagaggcataagatacagcatttcttctgaggccctgaagaagtatcaagtgggctttgacattgcggtggtgagagcgacccctcctcacctggagaactgggaaatgtggattctcagggaccgcgctgttcacgagctccaggctgtgctgctggccctggtcctggggcgctgagccgcatctgcaatagcacacttgcccggccacctgctgccgtgagcctttgctgctgaagcccctggggtcgcctctacctgatgaggatgtgcacccccattagggggctgctcatggcccttgcagtgatgtttgggacagcgatggcatttgcacccataccccggatcacctgggagcacagagaggtgcacctggtgcagtttcatgagccagacatctacaactactcagccttgctgctgagcgaggacaaggacaccttgtacataggtgcccgggaggcggtcttcgctgtgaacgcactcaacatctccgagaagcagcatgaggtgtattggaaggtctcagaagacaaaaaagcaaaatgtgcagaaaaggggaaatcaaaacagacagagtgcctcaactacatccgggtgctgcagccactcagcgccacttccctttacgtgtgtgggaccaacgcattccagccggcctgtgaccacctgaacttaacatcctttaagtttctggggaaaaatgaagatggcaaaggaagatgtccctttgacccagcacacagctacacatccgtcatggttgatggagaactttattcggggacgtcgtataattttttgggaagtgaacccatcatctcccgaaattcttcccacagtcctctgaggacagaatatgcaatcccttggctgaacgagcctagtttcgtgtttgctgacgtgatccgaaaaagcccagacagccccgacggcgaggatgacagggtctacttcttcttcacggaggtgtctgtggagtatgagtttgtgttcagggtgctgatcccacggatagcaagagtgtgcaagggggaccagggcggcctgaggaccttgcagaagaaatggacctccttcctgaaagcccgactcatctgctcccggccagacagcggcttggtcttcaatgtgctgcgggatgtcttcgtgctcaggtccccgggcctgaaggtgcctgtgttctatgcactcttcaccccacagctgaacaacgtggggctgtcggcagtgtgcgcctacaacctgtccacagccgaggaggtcttctcccacgggaagtacatgcagagcaccacagtggagcagtcccacaccaagtgggtgcgctataatggcccggtacccaagccgcggcctggagcgtgcatcgacagcgaggcacgggccgccaactacaccagctccttgaatttgccagacaagacgctgcagttcgttaaagaccaccctttgatggatgactcggtaaccccaatagacaacaggcccaggttaatcaagaaagatgtgaactacacccagatcgtggtggaccggacccaggccctggatgggactgtctatgatgtcatgtttgtcagcacagaccggggagctctgcacaaagccatcagcctcgagcacgctgttcacatcatcgaggagacccagctcttccaggactttgagccagtccagaccctgctgctgtcttcaaagaagggcaacaggtttgtctatgctggctctaactcgggcgtggtccaggccccgctggccttctgtgggaagcacggcacctgcgaggactgtgtgctggcgcgggacccctactgcgcctggagcccgcccacagcgacctgcgtggctctgcaccagaccgagagccccagcaggggtttgattcaggagatgagcggcgatgcttctgtgtgcccggataaaagtaaaggaagttaccggcagcattttttcaagcacggtggcacagcggaactgaaatgctcccaaaaatccaacctggcccgggtcttttggaagttccagaatgacgtgttgaaggccgagagccccaagtacggtcttatgggcagaaaaaacttgctcatcttcaacttgtcagaaggagacagtggggtgtaccagtgcctgtcagaggagagggttaagaacaaaacggtcttccaagtggtcgccaagcacgtcctggaagtgaaggtggttccaaagcccgtagtggcccccaccttgtcagttgttcagacagaaggtagtaggattgccaccaaagtgttggtggcatccacccaagggtcttctcccccaaccccagccgtgcaggccacctcctccggggccatcacccttcctcccaagcctgcgcccaccggcacatcctgcgaaccaaagatcgtcatcaacacggtcccccagctccactcggagaaaaccatgtatcttaagtccagcgacaaccgcctcctcatgtccctcttcctcttcttctttgttctcttcctctgcctctttttctacaactgctataagggatacctgcccagacagtgcttgaaattccgctcggccctactaattgggaagaagaagcccaagtcagatttctgtgaccgtgagcagagcctgaaggagacgttagtagagccagggagcttctcccagcagaatggggagcaccccaagccagccctggacaccggctatgagaccgagcaagacaccatcaccagcaaagtccccacggatagggaggactcacagaggatcgacgacctttctgccagggacaagccctttgacgtcaagtgtgagctgaagttcgctgactcagacgcagatggagactgaggccggctgtgcatccccgctggtgcctcggctgcgacgtgtccaggcgtggagagttttgtgtttctcctgttcagtatccgagtctcgtgcagtgctgcgtaggttagcccgcatcgtgcagacaacctcagtcctcttgtctattttctcttgggttgagcctgtgacttggtttctctttgtccttttggaaaaatgacaatccttgcatcccagtcttgtgttccgaagtcagtcggagtacttgaagaaggcccacgggcggcacggagttcctgagccctttctgtagtgggggaaaggtggctggacctctgttggctgagaagagcatcccttcagcttcccctccccgtagcagccactaaaagattatttaattccagattggaaatgacattttagtttatcagattggtaacttatcgcctgttgtccagattggcacgaaccttttcttccacttaattatttttttaggattttgctttgattgtgtttatgtcatgggtcatttttttttagttacagaagcagatgtgttaatatttagaagaagatgtatatcttccagattttgttatatatttggcataaaatacggcttacgttgcttaagattctcagggataaacttccttttgctaaatgcattctttctgcttttagaaatgtagacataaacactccccggagcccactcaccttttttctttttctttttttttttttaactttattccttgagggaagcattgtttttggagagattttctttctgtacttcgttttacttttctttttttttaacttttactctctcgaagaagaggaccttcccacatccacgaggtgggttttgagcaagggaaggtagcctggatgagctgagtggagccaggctggcccagagctgagatgggagtgcggtacaatctggagcccacagctgtcggtcagaacctcctgtgagacagatggaaccttcacaagggcgcctttggttctctgaacatctcctttctcttcttgcttcaattgcatacccactgcctgcccagactttctatccagcctcactgagctgcccactactggaagggaactgggcctcggtggccggggccgcgagctgtgaccacagcaccctcaagcatacggcgctgttcctgccactgtcctgaagatgtgaatgggtggtacgatttcaacactggttaatttcacactccatctccccgctttgtaaatacccatcgggaagagactttttttccatggtgaagagcaataaactctggatgtttgtgcgcgtgtgtggacagtcttatcttccagcatgataggatttgaccattttggtgtaaacatttgtgttttataagatttaccttgtttttatttttctactttgaattgtatacatttggaaagtacccaaataaatgagaagcttctatccttaaaaaaaaaaaaaaaaaaaaaaaaaaaaaaaaaaaaaaaaaaaaaaa

SEQ ID NO: 524 - DNA, 1607 bp, Homo sapiens
aatgactcctttcggtaagtgcagtggaagctgtacactgcccaggcaaagcgtccgggcagcgtaggcgggcgactcagatcccagccagtggacttagcccctgtttgctcctccgataactggggtgaccttggttaatattcaccagcagcctcccccgttgcccctctggatccactgcttaaatacggacgaggacagggccctgtctcctcagcttcaggcaccaccactgacctgggacagtgaatcgacaatgccgtcttctgtctcgtggggcatcctcctgctggcaggcctgtgctgcctggtccctgtctccctggctgaggatccccagggagatgctgcccagaagacagatacatcccaccatgatcaggatcacccaaccttcaacaagatcacccccaacctggctgagttcgccttcagcctataccgccagctggcacaccagtccaacagcaccaatatcttcttctccccagtgagcatcgctacagcctttgcaatgctctccctggggaccaaggctgacactcacgatgaaatcctggagggcctgaatttcaacctcacggagattccggaggctcagatccatgaaggcttccaggaactcctccgtaccctcaaccagccagacagccagctccagctgaccaccggcaatggcctgttcctcagcgagggcctgaagctagtggataagtttttggaggatgttaaaaagttgtaccactcagaagccttcactgtcaacttcggggacaccgaagaggccaagaaacagatcaacgattacgtggagaagggtactcaagggaaaattgtggatttggtcaaggagcttgacagagacacagtttttgctctggtgaattacatcttctttaaaggcaaatgggagagaccctttgaagtcaaggacaccgaggaagaggacttccacgtggaccaggtgaccaccgtgaaggtgcctatgatgaagcgtttaggcatgtttaacatccagcactgtaagaagctgtccagctgggtgctgctgatgaaatacctgggcaatgccaccgccatcttcttcctgcctgatgaggggaaactacagcacctggaaaatgaactcacccacgatatcatcaccaagttcctggaaaatgaagacagaaggtctgccagcttacatttacccaaactgtccattactggaacctatgatctgaagagcgtcctgggtcaactgggcatcactaaggtcttcagcaatggggctgacctctccggggtcacagaggaggcacccctgaagctctccaaggccgtgcataaggctgtgctgaccatcgacgagaaagggactgaagctgctggggccatgtttttagaggccatacccatgtctatcccccccgaggtcaagttcaacaaaccctttgtcttcttaatgattgaacaaaataccaagtctcccctcttcatgggaaaagtggtgaatcccacccaaaaataactgcctctcgctcctcaacccctcccctccatccctggccccctccctggatgacattaaagaagggttgagctggtccctgcctgcaaaa

SEQ ID NO: 525 - DNA, 1902 bp, Homo sapiens
tgggcaggaactgggcactgtgcccagggcatgcactgcctccacgcagcaaccctcagagtcctgagctgaaccaagaaggaggagggggtcgggcctccgaggaaggcctagccgctgctgctgccaggaattccaggttggaggggcggcaacctcctgccagccttcaggccactctcctgtgcctgccagaagagacagagcttgaggagagcttgaggagagcaggaaagggcggcagtaagtcttcagcatcaggcattttggggtgactcagtaaatggtagatcttgctaccagtggaacagccactaaggattctgcagtgagagcagagggccagctaagtggtactctcccagagactgtctgactcacgccaccccctccaccttggacacaggacgctgtggtttctgagccaggtacaatgactcctttcgcagcctcccccgttgcccctctggatccactgcttaaatacggacgaggacagggccctgtctcctcagcttcaggcaccaccactgacctgggacagtgaatcgacaatgccgtcttctgtctcgtggggcatcctcctgctggcaggcctgtgctgcctggtccctgtctccctggctgaggatccccagggagatgctgcccagaagacagatacatcccaccatgatcaggatcacccaaccttcaacaagatcacccccaacctggctgagttcgccttcagcctataccgccagctggcacaccagtccaacagcaccaatatcttcttctccccagtgagcatcgctacagcctttgcaatgctctccctggggaccaaggctgacactcacgatgaaatcctggagggcctgaatttcaacctcacggagattccggaggctcagatccatgaaggcttccaggaactcctccgtaccctcaaccagccagacagccagctccagctgaccaccggcaatggcctgttcctcagcgagggcctgaagctagtggataagtttttggaggatgttaaaaagttgtaccactcagaagccttcactgtcaacttcggggacaccgaagaggccaagaaacagatcaacgattacgtggagaagggtactcaagggaaaattgtggatttggtcaaggagcttgacagagacacagtttttgctctggtgaattacatcttctttaaaggcaaatgggagagaccctttgaagtcaaggacaccgaggaagaggacttccacgtggaccaggtgaccaccgtgaaggtgcctatgatgaagcgtttaggcatgtttaacatccagcactgtaagaagctgtccagctgggtgctgctgatgaaatacctgggcaatgccaccgccatcttcttcctgcctgatgaggggaaactacagcacctggaaaatgaactcacccacgatatcatcaccaagttcctggaaaatgaagacagaaggtctgccagcttacatttacccaaactgtccattactggaacctatgatctgaagagcgtcctgggtcaactgggcatcactaaggtcttcagcaatggggctgacctctccggggtcacagaggaggcacccctgaagctctccaaggccgtgcataaggctgtgctgaccatcgacgagaaagggactgaagctgctggggccatgtttttagaggccatacccatgtctatcccccccgaggtcaagttcaacaaaccctttgtcttcttaatgattgaacaaaataccaagtctcccctcttcatgggaaaagtggtgaatcccacccaaaaataactgcctctcgctcctcaacccctcccctccatccctggccccctccctggatgacattaaagaagggttgagctggtccctgcctgcaaaa

SEQ ID NO: 526 - DNA, 1588 bp, Homo sapiens
tgggcaggaactgggcactgtgcccagggcatgcactgcctccacgcagcaaccctcagagtcctgagctgaaccaagaaggaggagggggtcgggcctccgaggaaggcctagccgctgctgctgccaggaattccaggttggaggggcggcaacctcctgccagccttcaggccactctcctgtgcctgccagaagagacagagcttgaggagagcttgaggagagcaggaaaggacaatgccgtcttctgtctcgtggggcatcctcctgctggcaggcctgtgctgcctggtccctgtctccctggctgaggatccccagggagatgctgcccagaagacagatacatcccaccatgatcaggatcacccaaccttcaacaagatcacccccaacctggctgagttcgccttcagcctataccgccagctggcacaccagtccaacagcaccaatatcttcttctccccagtgagcatcgctacagcctttgcaatgctctccctggggaccaaggctgacactcacgatgaaatcctggagggcctgaatttcaacctcacggagattccggaggctcagatccatgaaggcttccaggaactcctccgtaccctcaaccagccagacagccagctccagctgaccaccggcaatggcctgttcctcagcgagggcctgaagctagtggataagtttttggaggatgttaaaaagttgtaccactcagaagccttcactgtcaacttcggggacaccgaagaggccaagaaacagatcaacgattacgtggagaagggtactcaagggaaaattgtggatttggtcaaggagcttgacagagacacagtttttgctctggtgaattacatcttctttaaaggcaaatgggagagaccctttgaagtcaaggacaccgaggaagaggacttccacgtggaccaggtgaccaccgtgaaggtgcctatgatgaagcgtttaggcatgtttaacatccagcactgtaagaagctgtccagctgggtgctgctgatgaaatacctgggcaatgccaccgccatcttcttcctgcctgatgaggggaaactacagcacctggaaaatgaactcacccacgatatcatcaccaagttcctggaaaatgaagacagaaggtctgccagcttacatttacccaaactgtccattactggaacctatgatctgaagagcgtcctgggtcaactgggcatcactaaggtcttcagcaatggggctgacctctccggggtcacagaggaggcacccctgaagctctccaaggccgtgcataaggctgtgctgaccatcgacgagaaagggactgaagctgctggggccatgtttttagaggccatacccatgtctatcccccccgaggtcaagttcaacaaaccctttgtcttcttaatgattgaacaaaataccaagtctcccctcttcatgggaaaagtggtgaatcccacccaaaaataactgcctctcgctcctcaacccctcccctccatccctggccccctccctggatgacattaaagaagggttgagctggtccctgcctgcaaaa

SEQ ID NO: 527 - DNA, 2245 bp, Homo sapiens
ctcagctacgggacacatttcaggtatccaaggcagcagaggtgagtgggtcccccgagctctgtgaccttatgctccacactaactctggcagagcctccgtttcctcatagaacaaagaacagccaccatgcagctcttcctcctcttgtgcctggtgcttctcagccctcagggggcctcccttcaccgccaccacccccgggagatgaagaagagagtcgaggacctccatgtaggtgccacggtggcccccagcagcagaagggactttacctttgacctctacagggccttggcttccgctgcccccagccagaacatcttcttctcccctgtgagcatctccatgagcctggccatgctctccctgggggctgggtccagcacaaagatgcagatcctggagggcctgggcctcaacctccagaaaagctcagagaaggagctgcacagaggctttcagcagctccttcaggaactcaaccagcccagagatggcttccagctgagcctcggcaatgcccttttcaccgacctggtggtagacctgcaggacaccttcgtaagtgccatgaagacgctgtacctggcagacactttccccaccaactttagggactctgcaggggccatgaagcagatcaatgattatgtggcaaagcaaacgaagggcaagattgtggacttgcttaagaacctcgatagcaatgcggtcgtgatcatggtgaattacatcttctttaaagctaagtgggagacaagcttcaaccacaaaggcacccaagagcaagacttctacgtgacctcggagactgtggtgcgggtacccatgatgagccgcgaggatcagtatcactacctcctggaccggaacctctcctgcagggtggtgggggtcccctaccaaggcaatgccacggctttgttcattctccccagtgagggaaagatgcagcaggtggagaatggactgagtgagaaaacgctgaggaagtggcttaagatgttcaaaaagaggcagctcgagctttaccttcccaaattctccattgagggctcctatcagctggagaaagtcctccccagtctggggatcagtaacgtcttcacctcccatgctgatctgtccggcatcagcaaccactcaaatatccaggtgtctgagatggtgcacaaagctgtggtggaggtggacgagtcgggaaccagagcagcggcagccacggggacaatcttcactttcaggtcggcccgcctgaactctcagaggctagtgttcaacaggccctttctgatgttcattgtggataacaacatcctcttccttggcaaagtgaaccgcccctgaggtggggcttctcctgaaatctacaggcctcagggtgggagatgaagggggctatgctatggcccatctgtatgctggtagctagtgatttacacaggtttagttgactaatgaggcattacaaataatattactctatgatgattgcttccacccacacgactgcaacatacaggtgccttggggaaatgtggagaacattcaatcttgccgtcactattcatcaatgaagattagcactgagatccagagaggctggatgacttgctcaagttcaccagcatggtagtggcaaagagaggtccagagtcctggcccttgatgcccagctcagtgccacaaagctcagtaggagggatgttccagtggatgagggccaccaggaagcacaggtccaaggctggtcccacacttatcagcagcaacaactgtcagttcatcctgcatgggaaaaatgttggaatgggagtctgaaatggggctactgtttcagtcctaacgtgctgtgtgacattgggacaacactttccctctctggacctcagtttccctctgtatacaaggatcagattcttgctgtgacccaagaactcctgaaatcatatagaaaggctggggtgggccctgtcattcgtggttgatttcaatacactcaagtgccattcatcctttaagaaaaacatctggatatcaaggtggaaatggcccatttaatgattgattatatcattttgtggatatagttataatctgatgggcctggctgggagtggaagaagggaagccttttgcaaatagtagagtgtcagttgcaggtgccaatgactaactttttgaattctatgttggcattaacaataaagcattttgcaaacaaaaaaaaaaaaaaaaaaa

SEQ ID NO: 528 - DNA, 1984 bp, Homo sapiens
ctgatttacaggaactcacaccagcgatcaatcttccttaatttgtaactgggcagtgtcccgggccagccaatagctaagactgccccccccgcaccccaccctccctgaccctgggggactctctactcagtctgcactggagctgcctggtgaccagaagtttggagtccgctgacgtcgccgcccagatggcctccaggctgaccctgctgaccctcctgctgctgctgctggctggggatagagcctcctcaaatccaaatgctaccagctccagctcccaggatccagagagtttgcaagacagaggcgaagggaaggtcgcaacaacagttatctccaagatgctattcgttgaacccatcctggaggtttccagcttgccgacaaccaactcaacaaccaattcagccaccaaaataacagctaataccactgatgaacccaccacacaacccaccacagagcccaccacccaacccaccatccaacccacccaaccaactacccagctcccaacagattctcctacccagcccactactgggtccttctgcccaggacctgttactctctgctctgacttggagagtcattcaacagaggccgtgttgggggatgctttggtagatttctccctgaagctctaccacgccttctcagcaatgaagaaggtggagaccaacatggccttttccccattcagcatcgccagcctccttacccaggtcctgctcggggctggggagaacaccaaaacaaacctggagagcatcctctcttaccccaaggacttcacctgtgtccaccaggccctgaagggcttcacgaccaaaggtgtcacctcagtctctcagatcttccacagcccagacctggccataagggacacctttgtgaatgcctctcggaccctgtacagcagcagccccagagtcctaagcaacaacagtgacgccaacttggagctcatcaacacctgggtggccaagaacaccaacaacaagatcagccggctgctagacagtctgccctccgatacccgccttgtcctcctcaatgctatctacctgagtgccaagtggaagacaacatttgatcccaagaaaaccagaatggaaccctttcacttcaaaaactcagttataaaagtgcccatgatgaatagcaagaagtaccctgtggcccatttcattgaccaaactttgaaagccaaggtggggcagctgcagctctcccacaatctgagtttggtgatcctggtaccccagaacctgaaacatcgtcttgaagacatggaacaggctctcagcccttctgttttcaaggccatcatggagaaactggagatgtccaagttccagcccactctcctaacactaccccgcatcaaagtgacgaccagccaggatatgctctcaatcatggagaaattggaattcttcgatttttcttatgaccttaacctgtgtgggctgacagaggacccagatcttcaggtttctgcgatgcagcaccagacagtgctggaactgacagagactggggtggaggcggctgcagcctccgccatctctgtggcccgcaccctgctggtctttgaagtgcagcagcccttcctcttcgtgctctgggaccagcagcacaagttccctgtcttcatggggcgagtatatgaccccagggcctgagacctgcaggatcaggttagggcgagcgctacctctccagcctcagctctcagttgcagccctgctgctgcctgcctggacttggcccctgccacctcctgcctcaggtgtccgctatccaccaaaagggctccctgagggtctgggcaagggacctgcttctattagcccttctccatggccctgccatgctctccaaaccactttttgcagctttctctagttcaagttcaccagactctataaataaaacctgacagaccatgactttcaaaaaaaaaaaaaaaaaa

SEQ ID NO: 529 - DNA, 1832 bp, Homo sapiens
gctggctggctccgcaggtccgctgacgtcgccgcccagatggcctccaggctgaccctgctgaccctcctgctgctgctgctggctggggatagagcctcctcaaatccaaatgctaccagctccagctcccaggatccagagagtttgcaagacagaggcgaagggaaggtcgcaacaacagttatctccaagatgctattcgttgaacccatcctggaggtttccagcttgccgacaaccaactcaacaaccaattcagccaccaaaataacagctaataccactgatgaacccaccacacaacccaccacagagcccaccacccaacccaccatccaacccacccaaccaactacccagctcccaacagattctcctacccagcccactactgggtccttctgcccaggacctgttactctctgctctgacttggagagtcattcaacagaggccgtgttgggggatgctttggtagatttctccctgaagctctaccacgccttctcagcaatgaagaaggtggagaccaacatggccttttccccattcagcatcgccagcctccttacccaggtcctgctcggggctggggagaacaccaaaacaaacctggagagcatcctctcttaccccaaggacttcacctgtgtccaccaggccctgaagggcttcacgaccaaaggtgtcacctcagtctctcagatcttccacagcccagacctggccataagggacacctttgtgaatgcctctcggaccctgtacagcagcagccccagagtcctaagcaacaacagtgacgccaacttggagctcatcaacacctgggtggccaagaacaccaacaacaagatcagccggctgctagacagtctgccctccgatacccgccttgtcctcctcaatgctatctacctgagtgccaagtggaagacaacatttgatcccaagaaaaccagaatggaaccctttcacttcaaaaactcagttataaaagtgcccatgatgaatagcaagaagtaccctgtggcccatttcattgaccaaactttgaaagccaaggtggggcagctgcagctctcccacaatctgagtttggtgatcctggtaccccagaacctgaaacatcgtcttgaagacatggaacaggctctcagcccttctgttttcaaggccatcatggagaaactggagatgtccaagttccagcccactctcctaacactaccccgcatcaaagtgacgaccagccaggatatgctctcaatcatggagaaattggaattcttcgatttttcttatgaccttaacctgtgtgggctgacagaggacccagatcttcaggtttctgcgatgcagcaccagacagtgctggaactgacagagactggggtggaggcggctgcagcctccgccatctctgtggcccgcaccctgctggtctttgaagtgcagcagcccttcctcttcgtgctctgggaccagcagcacaagttccctgtcttcatggggcgagtatatgaccccagggcctgagacctgcaggatcaggttagggcgagcgctacctctccagcctcagctctcagttgcagccctgctgctgcctgcctggacttggcccctgccacctcctgcctcaggtgtccgctatccaccaaaagggctccctgagggtctgggcaagggacctgcttctattagcccttctccatggccctgccatgctctccaaaccactttttgcagctttctctagttcaagttcaccagactctataaataaaacctgacagaccatgactttcaaaaaaaaaaaaaaaaaa

SEQ ID NO: 530 - DNA, 3234 bp, Homo sapiens
ggctagcgtcagcgccagccagaattaaggaagttcactggagtaaaatggaggcctcagtaatattacccattctgaagaaaaaactagccttcctttcaggaggaaaggacagacggagtggcctcattttgacaattccattatgcctcgaacagacaaatatggatgagctgagtgtcaccttagactacctactcagcattccaagtgagaagtgtaaggctagaggatttaccgtgattgtggatggcagaaaatcacagtggaatgtggtgaaaacagtagtcgtaatgctacagaatgttgttccagctgaggtgtcccttgtttgtgtggtaaagccagatgaattctgggataagaaagtaacgcatttttgtttttggaaggagaaggatagacttggctttgaggttattttagtgtccgccaacaaattgactcgttatatagaaccatgccaattaacagaagattttggtgggagtctcacctatgatcacatggactggttaaataagaggctggtttttgagaagtttacaaaggaatctacatcattattagatgaacttgctttgattaacaatggaagtgataaaggaaatcagcaagagaaagaaaggtctgtggatttaaactttcttccatcggttgatcctgaaacagttcttcagacagggcatgaattgttgtccgaattacagcagcgtcgatttaatggctcagacggaggggtttcatggtctcctatggatgatgaacttcttgcacagccacaggttatgaaattattagattcactccgagagcaatatacccgctaccaggaagtttgtaggcaacgtagcaagcgcacacagttagaagagattcaacagaaggtaatgcaggtggtgaactggctagaagggcctggatcagaacaactaagagcccagtggggcattggagactccattagggcctcccaggccctacagcagaaacacgaagagattgagagccagcacagtgaatggtttgcagtgtatgtggaacttaatcagcaaattgcagcactcttgaatgctggcgatgaggaagatcttgtggaactaaagtcactgcagcaacaacttagtgatgtttgttatcgacaggccagtcagctggaatttaggcaaaatctcttacaagcagctcttgaatttcatggtgttgcccaagatttgtctcagcagttggatggcttattagggatgttgtgcgtagatgtagcaccagctgatggagcatcgattcagcaaactttaaaactgcttgaagagaagctgaaaagtgttgatgtgggattgcaaggtttgcgtgaaaaaggtcaaggtctcctggatcagatctccaatcaggcatcctgggcctatggaaaggatgtaaccattgaaaataaagaaaatgtggaccacatacaaggagtgatggaagatatgcagcttagaaaacaaagatgtgaagacatggtagatgtgcgaaggttaaagatgcttcagatggtgcagttgtttaaatgtgaagaagatgctgcccacgcagtagaatggctaagtgaacttctggatgctctgcttaagactcacatcagattgggcgatgatgctcaagaaacgaaagttttgctggaaaagcatagaaaatttgttgatgttgcacagagcacttatgactatggcaggcagttgctacaggccacagttgtgttatgccaatctttgcgctgcacttctcggtcatctggggatacacttcctcgactgaacagagtatggaaacaatttacaatagcatctgaagagagagtacatagattggaaatggctattgcatttcactcaaatgctgaaaagattttgcaggactgtccagaagagcctgaagctattaatgatgaggagcaatttgatgaaattgaagcagttgggaaatcacttttggatagattaactgttccagtagtttatcctgatggaaccgaacaatattttgggagtccaagtgacatggcttctactgcagaaaacatcagagacaggatgaaactagttaatctcaaaaggcagcagctgagacatcctgaaatggtgaccacagagagctaatagctaccagctacctacagatttgcagttcataatcccgcatgttgtcaacatactacagcattagccaccacaccttaagatgcatttcacagccaaaataagtctcatttctttttatgacacatttctctttacatgttaacaccttactactaccaaggcataattacttaacatgcttcgaggctgtagattccaagtatcttaaaagaaggaactataaacattgcactgaaaacttgctttaaagctttacctgacctgtcagtttgtagacaaacaactgataataagctttgaatggtgctaataagagtaggaattctctctattaaaaagaaaaaaaaaaagttgcccttcctccacaggtgatttagtaaatttagacagtagttaaactcttgttagtagacagtggtgtcctcaaaattttactttgtaattcttcagaattgattatttttattgtgtcaatacagagaaagcctttcagatctttgatatatcatagtcattaaaagaccttttcctatttgtattgataatgtattaaaagttgtttgtgcttaataaaagacttctttaaacatcttatttaatttagtagttacatcctatttccaaacatgagtgccttatttaaaagggcattcttaggactgtgaggatggtttaatatttgttttttcatggtggttgcatgtattttagacaggaaatacatatgtaagcatgtgtatataataaataagcatgttttatcatgaaaaattattgtgaacaatttagatctttaagaacttattaataatggaatactatttctaatttttctctttttcaacttgaaaaatattctcaaaattattaactaccctgaagatactttgtctttaggggaggagggctgaggaagaaggcatacataattacttcagtgtaatcctttatatcagagtaatctttcaggaactaaaatagcaattgttaataaaatttagtttctcattatagtctaaaagcaaaataaattctgaagtagtccaataacagaactgtatgacccctttagaaataaaatttatcatgaaat

SEQ ID NO: 531 - DNA, 2146 bp, Homo sapiens
atgggttcagactttatgccctgaaaagatccttccagccctggccatcttggacttctggagctaccctggctcacaggggtcttgttgccctgggtgtccccagttcttgaaaagaatcagcctgggaggggccacaccctgaccatccccctttatcccttctgagatgtttgttaggaagtctgggtccaggggatatcatttcttgttccatccatgcaggggttgcttacctcgggtaggaaaccctcaggcggtggcaggtgcacaggtaggggaggatggagagggcagtggtgcctgaagccctggatgggcggagctgaccccccaacaccaactctctcatgcctgctcctccctgtccccccagagctgcctgatcattgctacagaatgaactctagcccagctgggaccccaagtccacagccctccagggccaatgggaacatcaacctggggccttcagccaacccaaatgcccagcccacggacttcgacttcctcaaagtcatcggcaaagggaactacgggaaggtcctactggccaagcgcaagtctgatggggcgttctatgcagtgaaggtactacagaaaaagtccatcttaaagaagaaagagcagagccacatcatggcagagcgcagtgtgcttctgaagaacgtgcggcaccccttcctcgtgggcctgcgctactccttccagacacctgagaagctctacttcgtgctcgactatgtcaacgggggagagctcttcttccacctgcagcgggagcgccggttcctggagccccgggccaggttctacgctgctgaggtggccagcgccattggctacctgcactccctcaacatcatttacagggatctgaaaccagagaacattctcttggactgccagggacacgtggtgctgacggattttggcctctgcaaggaaggtgtagagcctgaagacaccacatccacattctgtggtacccctgagtacttggcacctgaagtgcttcggaaagagccttatgatcgagcagtggactggtggtgcttgggggcagtcctctacgagatgctccatggcctgccgcccttctacagccaagatgtatcccagatgtatgagaacattctgcaccagccgctacagatccccggaggccggacagtggccgcctgtgacctcctgcaaagccttctccacaaggaccagaggcagcggctgggctccaaagcagactttcttgagattaagaaccatgtattcttcagccccataaactgggatgacctgtaccacaagaggctaactccacccttcaacccaaatgtgacaggacctgctgacttgaagcattttgacccagagttcacccaggaagctgtgtccaagtccattggctgtacccctgacactgtggccagcagctctggggcctcaagtgcattcctgggattttcttatgcgccagaggatgatgacatcttggattgctagaagagaaggacctgtgaaactactgaggccagctggtattagtaaggaattaccttcagctgctaggaagagcgactcaaactaacaatggcttcaacgagaagcaggtttattttttccagcacataaaagaaaaataatgtttcggagtccaggactggcaggacaggtcatcagatactcagaggctgtatctctgccctgccaaccttgacaaatggcttccaatgttaggtttgctacaagatggttactggagctctagctgcctattttgtgtttagggaagggaaaatggaggaaaggggagaagagcaaagggcgcttttaaagagctttcccaaaagctccacccaatgacttctgcttccatctcactaaccacccacccctacctggaatggaggctgggagatgtggcttatttgctgggtacgtgactatccctaataacaaaggggttctgacactaagacattaggggagaatgttgggtaggcagccagcactcttttaccagagggcctcctggtgtttggattttgatctcaatgtgtaaaatgacagagatgtaacaagctcatagggtatcaatatctcttattgttctatgttgaaaaaaaaaaaaaaaaaaaaaaaaaaa

SEQ ID NO: 532 - DNA, 1862 bp, Homo sapiens
gcttgacaagtcaggattgtgcctccagtcagaaggaccatgaagagagagaagagggcagagccgtgcatggggctgctccccaggacctgagcaggaacctggagttttcagagctgcctgatcattgctacagaatgaactctagcccagctgggaccccaagtccacagccctccagggccaatgggaacatcaacctggggccttcagccaacccaaatgcccagcccacggacttcgacttcctcaaagtcatcggcaaagggaactacgggaaggtcctactggccaagcgcaagtctgatggggcgttctatgcagtgaaggtactacagaaaaagtccatcttaaagaagaaagagcagagccacatcatggcagagcgcagtgtgcttctgaagaacgtgcggcaccccttcctcgtgggcctgcgctactccttccagacacctgagaagctctacttcgtgctcgactatgtcaacgggggagagctcttcttccacctgcagcgggagcgccggttcctggagccccgggccaggttctacgctgctgaggtggccagcgccattggctacctgcactccctcaacatcatttacagggatctgaaaccagagaacattctcttggactgccagggacacgtggtgctgacggattttggcctctgcaaggaaggtgtagagcctgaagacaccacatccacattctgtggtacccctgagtacttggcacctgaagtgcttcggaaagagccttatgatcgagcagtggactggtggtgcttgggggcagtcctctacgagatgctccatggcctgccgcccttctacagccaagatgtatcccagatgtatgagaacattctgcaccagccgctacagatccccggaggccggacagtggccgcctgtgacctcctgcaaagccttctccacaaggaccagaggcagcggctgggctccaaagcagactttcttgagattaagaaccatgtattcttcagccccataaactgggatgacctgtaccacaagaggctaactccacccttcaacccaaatgtgacaggacctgctgacttgaagcattttgacccagagttcacccaggaagctgtgtccaagtccattggctgtacccctgacactgtggccagcagctctggggcctcaagtgcattcctgggattttcttatgcgccagaggatgatgacatcttggattgctagaagagaaggacctgtgaaactactgaggccagctggtattagtaaggaattaccttcagctgctaggaagagcgactcaaactaacaatggcttcaacgagaagcaggtttattttttccagcacataaaagaaaaataatgtttcggagtccaggactggcaggacaggtcatcagatactcagaggctgtatctctgccctgccaaccttgacaaatggcttccaatgttaggtttgctacaagatggttactggagctctagctgcctattttgtgtttagggaagggaaaatggaggaaaggggagaagagcaaagggcgcttttaaagagctttcccaaaagctccacccaatgacttctgcttccatctcactaaccacccacccctacctggaatggaggctgggagatgtggcttatttgctgggtacgtgactatccctaataacaaaggggttctgacactaagacattaggggagaatgttgggtaggcagccagcactcttttaccagagggcctcctggtgtttggattttgatctcaatgtgtaaaatgacagagatgtaacaagctcatagggtatcaatatctcttattgttctatgttgaaaaa

SEQ ID NO: 533 - DNA, 2220 bp, Homo sapiens
cagagatgctgccgctgctgctgccgctgcccctgctgtgggcagggccctcgctcaggatgcaagattccggctggagatgccagagtccgtgacggtgcaggagggtctgtgcatctttgtgcactgttcggtcttctacctcgagtatggctggaaagattctacccctgcttatggccactggttccgggaaggggtcagtgtagaccaggagactccagtggccacaaacaactcaactcaaaaagtgcagaaggagacccagggccgattccacctcctcggtgatccctcaaggaacaactgctccctgagcatcagagacgccaggaggagggacaacggttcatacttcttttgggtggcgagaggaagaacaaaatttagttacaaatattccccgctctctgtgtatgtgacagccctgacccacaggcccgacatcctcatcccggagttcctaaagtctggccatcccagcaacctgacctgctctgtgccctgggtctgtgagcagggaacaccccccatcttctcctggatgtcagctgcccccacctccctgggccccaggaccctccactcctcagtgctcacgatcatcccacggcctcaggaccacggcaccaacctcatctgtcaggtgacgttccccggagctggtgtgaccacggagagaaccatccagctcagtgtctcctggaaatcaggaaccgtggaagaggtggttgttttggccgtgggggtagtggctgtgaagatcctgcttctctgcctttgcctcatcatcctcaggtaagcactgcctgaagaccaaggacaggcatggggagggcagaggacatgatgctgaatcccagaatctcaatcctgggggtatgcagacagtttacgtggtcctggggccaggctggaggctgaattggtggtgagaattacacatgggccatttgtggtcagtttgtgtctgtcccaactgagggccaaatgccaggatggggagcttcctgttgtcatcaaggaagtctagacctgctcttcctccctgtgatccctccagcctctagcagggcacaggaagttgagttggctgccctttgctcccttcatgtggccacacttacaggtccttgtctcttcactcaatgtcagtttccacaagaagaaggcggtgagggcagtggaggttgaggagaatgtatatgctgtcatgggttaatctctcaggtgagtgatgtgggcctctcactcttcaacatcctgctggataactcctccacaatggcctccaggattgctctgcccatcatggccaaagttaagccaactgtcttcctcctcaaacctacttttcctgggatgtgggttcttcatcctgcagatgacaaagaggcctcatctctaaagtcagaacctgggtgtgggtctccatcttgacccccctcccttctctagatcccataaattactagctcttgtccctccttctcctaagcagggctcatcttgatgcccttttctccatcctgaccctggtcattcttgcggcctcacctcttccctgatcactgaacccttttcacctcctgcctccatctctccccaacacaggcctccagactgtacttccagatgtctcctcatccagttcctccacagtctgaatggccatgtttcctcttcattgctggagaatgaagtgcaaatgccactgcctggactgaaggcctttcacgatctgtcttctgctggactctgctcctgatcccccttctccttgcatcacccgaagtctccctacacccaccaggccaagccctctgtgattctgagactttgcatgtgtagttacttctcctgaaatggccttcctccccattcctgccaatccaggtccttatcatccttcaggttgtcttaaatgtcatccaggtgtgtgtatttttatgtaatccttgtatgatattaagcggagatgtggcatttgttcattaatttgtagacatattcagtaaccatactgaatatatataatgactatgtgccagcatttccgtatgtgcaagaagttcatcaatagatatagactcaaagagctctgtcatcaagctgttgttctgaagagcagaaggatacaaataaaaagaaataagtaaaaaaaaaaaaaaaaaaaaaaaaaaaaaaaaaaaaaaaaaaaaaaaaaaaaaaaaaaaaaaa

SEQ ID NO: 534 - DNA, 1789 bp, Homo sapiens
ggttcaggaacctgctggttctgatacataaatcagacagcctctgctgcatgacacgaagcttgcttctgcctggcatctgtgagcagctgccaggctccggccaggatcccttccttctcctcattggctgatggatcccaaggggctcctctccttgaccttcgtgctgtttctctccctggcttttggggcaagctacggaacaggtgggcgcatgatgaactgcccaaagattctccggcagttgggaagcaaagtgctgctgcccctgacatatgaaaggataaataagagcatgaacaaaagcatccacattgtcgtcacaatggcaaaatcactggagaacagtgtcgagaacaaaatagtgtctcttgatccatccgaagcaggccctccacgttatctaggagatcgctacaagttttatctggagaatctcaccctggggatacgggaaagcaggaaggaggatgagggatggtaccttatgaccctggagaaaaatgtttcagttcagcgcttttgcctgcagttgaggctttatgagcaggtctccactccagaaattaaagttttaaacaagacccaggagaacgggacctgcaccttgatactgggctgcacagtggagaagggggaccatgtggcttacagctggagtgaaaaggcgggcacccacccactgaacccagccaacagctcccacctcctgtccctcaccctcggcccccagcatgctgacaatatctacatctgcaccgtgagcaaccctatcagcaacaattcccagaccttcagcccgtggcccggatgcaggacagacccctcagaaacaaaaccatgggcagtgtatgctgggctgttagggggtgtcatcatgattctcatcatggtggtaatactacagttgagaagaagaggtaaaacgaaccattaccagacaacagtggaaaaaaaaagccttacgatctatgcccaagtccagaaaccaggtcctcttcagaagaaacttgactccttcccagctcaggacccttgcaccaccatatatgttgctgccacagagcctgtcccagagtctgtccaggaaacaaattccatcacagtctatgctagtgtgacacttccagagagctgacaccagagaccaacaaagggactttctgaaggaaaatggaaaaaccaaaatgaacactgaacttggccacaggcccaagtttcctctggcagacatgctgcacgtctgtacccttctcagatcaactccctggtgatgtttcttccacatacatctgtgaaatgaacaaggaagtgaggcttcccaagaatttagcttgctgtgcagtggctgcaggcgcagaacagagcgttacttgataacagcgttccatctttgtgttgtagcagatgaaatggacagtaatgtgagttcagactttgggcatcttgctcttggctggaactgataataaaaatcagactgaaagccaggacatctgagtacctatctcacacactgaccaccagtcacaaagtctggaaaagtttacattttggctatctttactttgttctgggagctgatcatgataacctgcagacctgatcaagcctctgtgcctcagtttctctctcaggataaagagtgaatagaggccgaagggtgaatttcttattatacataaaacactctgatattattgtataaaggaagctaagaatattattttatttgcaaaacccagaagctaaaaagtcaataaacagaaagaatgattttgagaaa

SEQ ID NO: 535 - DNA, 2672 bp, Homo sapiens
cttccagagagcaatatggctggttccccaacatgcctcaccctcatctatatcctttggcagctcacagggtcagcagcctctggacccgtgaaagagctggtcggttccgttggtggggccgtgactttccccctgaagtccaaagtaaagcaagttgactctattgtctggaccttcaacacaacccctcttgtcaccatacagccagaagggggcactatcatagtgacccaaaatcgtaatagggagagagtagacttcccagatggaggctactccctgaagctcagcaaactgaagaagaatgactcagggatctactatgtggggatatacagctcatcactccagcagccctccacccaggagtacgtgctgcatgtctacgagcacctgtcaaagcctaaagtcaccatgggtctgcagagcaataagaatggcacctgtgtgaccaatctgacatgctgcatggaacatggggaagaggatgtgatttatacctggaaggccctggggcaagcagccaatgagtcccataatgggtccatcctccccatctcctggagatggggagaaagtgatatgaccttcatctgcgttgccaggaaccctgtcagcagaaacttctcaagccccatccttgccaggaagctctgtgaaggtgctgctgatgacccagattcctccatggtcctcctgtgtctcctgttggtgcccctcctgctcagtctctttgtactggggctatttctttggtttctgaagagagagagacaagaagagtacattgaagagaagaagagagtggacatttgtcgggaaactcctaacatatgcccccattctggagagaacacagagtacgacacaatccctcacactaatagaacaatcctaaaggaagatccagcaaatacggtttactccactgtggaaataccgaaaaagatggaaaatccccactcactgctcacgatgccagacacaccaaggctatttgcctatgagaatgttatctagacagcagtgcactcccctaagtctctgctcaaaaaaaaaacaattctcggcccaaagaaaacaatcagaagaattcactgatttgactagaaacatcaaggaagaatgaagaacgttgacttttttccaggataaattatctctgatgcttctttagatttaagagttcataattccatccactgctgagaaatctcctcaaacccagaaggtttaatcacttcatcccaaaaatgggattgtgaatgtcagcaaaccataaaaaaagtgcttagaagtattcctatagaaatgtaaatgcaaggtcacacatattaatgacagcctgttgtattaatgatggctccaggtcagtgtctggagtttcattccatcccagggcttggatgtaaggattataccaagagtcttgctaccaggagggcaagaagaccaaaacagacagacaagtccagcagaagcagatgcacctgacaaaaatggatgtattaattggctctataaactatgtgcccagcactatgctgagcttacactaattggtcagacgtgctgtctgccctcatgaaattggctccaaatgaatgaactactttcatgagcagttgtagcaggcctgaccacagattcccagagggccaggtgtggatccacaggacttgaaggtcaaagttcacaaagatgaagaatcagggtagctgaccatgtttggcagatactataatggagacacagaagtgtgcatggcccaaggacaaggacctccagccaggcttcatttatgcacttgtgctgcaaaagaaaagtctaggttttaaggctgtgccagaacccatcccaataaagagaccgagtctgaagtcacattgtaaatctagtgtaggagacttggagtcaggcagtgagactggtggggcacggggggcagtgggtacttgtaaacctttaaagatggttaattcattcaatagatatttattaagaacctatgcggcccggcatggtggctcacacctgtaatcccagcactttgggaggccaaggtgggtgggtcatctgaggtcaggagttcaagaccagcctggccaacatggtgaaaccccatctctactaaagatacaaaaatttgctgagcgtggtggtgtgcacctgtaatcccagctactcgagaggccaaggcatgagaatcgcttgaacctgggaggtggaggttgcagtgagctgagatggcaccactgcactccggcctaggcaacgagagcaaaactccaatacaaacaaacaaacaaacacctgtgctaggtcagtctggcacgtaagatgaacatccctaccaacacagagctcaccatctcttatacttaagtgaaaaacatggggaaggggaaaggggaatggctgcttttgatatgttccctgacacatatcttgaatggagacctccctaccaagtgatgaaagtgttgaaaaacttaataacaaatgcttgttgggcaagaatgggattgaggattatcttctctcagaaaggcattgtgaaggaattgagccagatctctctccctactgcaaaaccctattgtagtaaaaaagtcttctttactatcttaataaaacagatattgtgagattcaaaaaaaaaaaaaaaa

SEQ ID NO: 536 - DNA, 3316 bp, Homo sapiens
atctgctcctgtaagcccagagaggcccagggacaacttccactttattctggatgttttcacttttgggacatcctgttctgagtcaagattcctccttctgaacatgggactttccagaaggaccacagctcctcccgtgcatccactcggcctgggaggttctggattttggctgtcgagggagtttgcctgcctctccagagaaagatggtcatgaggcccctgtggagtctgcttctctgggaagccctacttcccattacagttactggtgcccaagtgctgagcaaagtcgggggctcggtgctgctggtggcagcgcgtccccctggcttccaagtccgtgaggctatctggcgatctctctggccttcagaagagctcctggccacgtttttccgaggctccctggagactctgtaccattcccgcttcctgggccgagcccagctacacagcaacctcagcctggagctcgggccgctggagtctggagacagcggcaacttctccgtgttgatggtggacacaaggggccagccctggacccagaccctccagctcaaggtgtacgatgcagtgcccaggcccgtggtacaagtgttcattgctgtagaaagggatgctcagccctccaagacctgccaggttttcttgtcctgttgggcccccaacatcagcgaaataacctatagctggcgacgggagacaaccatggactttggtatggaaccacacagcctcttcacagacggacaggtgctgagcatttccctgggaccaggagacagagatgtggcctattcctgcattgtctccaaccctgtcagctgggacttggccacagtcacgccctgggatagctgtcatcatgaggcagcaccagggaaggcctcctacaaagatgtgctgctggtggtggtgcctgtctcgctgctcctgatgctggttactctcttctctgcctggcactggtgcccctgctcagggaaaaagaaaaaggatgtccatgctgacagagtgggtccagagacagagaacccccttgtgcaggatctgccataaaggacaatatgaactgatgcctggactatcagtaaccccactgcacaggcacacgatgctctgggacataactggtgcctggaaatcaccatggtcctcatatctcccatgggaatcctgtcctgcctcgaaggagcagcctgggcagccatcacaccacgaggacaggaagcaccagcacgtttcacacctcccccttccctctcccatcttctcatatcctggctcttctctgggcaagatgagccaagcagaacattccatccaggacactggaagttctccaggatccagatccatggggacattaatagtccaaggcattccctcccccaccactattcataaagtattaaccaactggcaccaaggaattgcctccagcctgagtcctaggctctaaaagatattacatatttgaactaatagaggaactctgagtcacccatgccagcatcagcttcagccccagaccctgcagtttgagatctgatgcttcctgagggccaaggcattgctgtaagaaaaggtctagaaataggtgaaagtgagaggtgggggacaggggtttctctttctggcctaaggactttcaggtaatcagagttcatgggccctcaaaggtaaattgcagttgtagacaccgaggatggttgacaacccatggttgagatgggcaccgttttgcaggaaacaccatattaatagacatcctcaccatctccatccgctctcacgcctcctgcaggatctgggagtgagggtggagagtctttcctcacgctccagcacagtggccaggaaaagaaatactgaatttgccccagccaacaggacgttcttgcacaacttcaagaaaagcagctcagctcaggatgagtcttcctgcctgaaactgagagagtgaagaaccataaaacgctatgcagaaggaacattatggagagaaagggtactgaggcactctagaatctgccacattcattttcaaatgcaaatgcagaagacttaccttagttcaaggggaggggacaaagaccccacagcccaacagcaggactgtagaggtcactctgactccatcaaactttttattgtggccatcttaggaaaatacattctgcccctgaatgattctgtctagaaaagctctggagtattgatcactactggaaaaacacttaaggagctaaacttaccttcggggattattagctgataaggttcacagtttctctcacccaggtgtaactggattttttctggggcctcaatccagtcttgataacagcgaggaaagaggtattgaagaaacaggggtgggtttgaagtactattttcccagggtggcttcaatctccccacctaggatgtcagccctgtccaaggaccttccctcttctccccagttcctgggcaatcacttcaccttggacaaaggatcagcacagctggcctccagatccacatcaccactcttccactcgattgttcccagatcctccctgcctggcctgctcagaggttccctgttggtaacctggctttatcaaattctcatccctttcccacacccacttctctcctatcaccttcccccaagattacctgaacagggtccatggccactcaacctgtcagcttgcaccatccccacctgccacctacagtcaggccacatgcctggtcactgaatcatgcaaaactggcctcagtccctaaaaatgatgtggaaaggaaagcccaggatctgacaatgagccctggtggatttgtggggaaaaaatacacagcactccccacctttctttcgttcatctccagggccccacctcagatcaaagcagctctggatgagatgggacctgcagctctccctccacaaggtgactcttagcaacctcatttcgacagtggtttgtagcgtggtgcaccagggccttgttgaacagatccacactgctctaataaagttcccatccttaatgactcacttgtcaactagtggactaattaaccctccaccaaaaaaacacaaagtgcttctgtgagaccaattttgtgctaatgagcattgagactgatgctttgtaagtcacaccacaacaaatattgattgagggcgctgcatgtgctgggtacatttcttggcacttgggaatcagtagtcaagcgaaacccttgcctttgagagtttatggtctggataatataaataaacaagtaagcataaaaaaaaaaaaaaaaa

SEQ ID NO: 537 - DNA, 3779 bp, Homo sapiens
ttctattgaaagggaaatgggagaacaatatgtgttcctatggctcagtccctataagattctgtactattcagagttgattttaagtgtcacttaactgaaattatccaacaaaccttcatggcatgaaacattaacacagctctttttatatggcatggttcctatggctcaatccctataagattctgtactagttcagagttgattttaaaagtcacttaactgaaattatccaacaaaccctcgaggacattaaacattaacgtggctctttttatatggcatggttcattatcatgccaataaatgattaatcgtaactctctgtcttgaccaataattttgctggacttttgtgattcacaacgtgctctgtgttgtaatgctacctcttgaaactgacatcctagctttattgttttttattacttccctaaggtggctttcaaaagagacaccaagtgacatatttttaggaggggtttaaaagtttgatggggtagaagtaaacgttgcttaactcaaccagcagcagagccagggcccagggaccagcgcttctgtggacttggcctttccagcagcagacccagcaatgaatgatccgaacagctgtgtggacaatgcaacagtttgctctggtgcatcctgtgtggtacctgagagcaatttcaataacatcctaagtgtggtcctaagtacggtgctgaccatcctgttggccttggtgatgttctccatgggatgcaacgtggaaatcaagaaatttctagggcacataaagcggccgtggggcatttgtgttggcttcctctgtcagtttggaatcatgcccctcacaggattcatcctgtcggtggcctttgacatcctcccgctccaggccgtagtggtgctcattataggatgctgccctggaggaactgcctccaatatcttggcctattgggtcgatggcgacatggacctgagcgtcagcatgaccacatgctccacactgcttgccctcggaatgatgccgctgtgcctccttatctataccaaaatgtgggtcgactctgggagcatcgtaattccctatgataacataggtacatctctggttgctctcgttgttcctgtttccattggaatgtttgttaatcacaaatggccccaaaaagcaaagatcatacttaaaattgggtccatcgcgggcgccatcctcattgtgctcatagctgtggttggaggaatattgtaccaaagcgcctggatcattgctcccaaactgtggattataggaacaatatttcctgtggcgggttactccctggggtttcttctggctagaattgctggtctaccctggtacaggtgccgaacggttgcttttgaaacggggatgcagaacacgcagctatgttccaccatcgttcagctctccttcactcctgaggagctcaatgtcgtattcaccttcccgctcatctacagcattttccagctcgcctttgccgcaatattcttaggattttatgtggcatacaagaaatgtcatggaaaaaacaaggcagaaattccagagagcaaagaaaatggaacggagccagagtcatcgttttataaggcaaatggaggatttcaacctgacgaaaagtagacatcaagtggacaaaacagacgagttccaaattacgttcttaaaccgtaactatatttaattatttgttttggtaggacagttggcagaaaagagttaaagtgaaaattggaatttcattggaattcatgtattggtttcagtaccaagtgactggtggcccaattctttaatgggacaaatattgtttcctatatatatgtatatgttttatatatgtatgtatactcatatagatatattgtcattgaaatattcccccaaaatattctcagactaaacctgacatagggaacaccgagaatgaaaacatcgttaacaccaaaactgaattcttatgcagaatttcctagcccatagatgacaacctgagtttctgtatgttaaagtagatgtaatgaattattattattacagtggtcacgattttcttcagtgtttatgattataaaaattgacatgaacatctttcactgacattttaatcattattttaaaagctttgcaacctatatatttatataactttgtaatataacatgggcaaatatctgacttcagtatttttaaaaagttgccttctccagtggcagtccaaaagcagaaatgagaggaaattattacaaaatagaattcaataaccatattggatgcaggctcttaactcagcagggatatcgtacatctattgctctacctcaggggtccagtgatacccactagatcttccaaggaaaaacataattctttcaaacggtgtgtatttggcaaagagctcttcaaatctgggagagggacttcctcaaggttttcctgtgtgcagtggatccacatagctaatatgacagctagtcagttgacagggaccacccacagtaagcaccatggtcagggaggtggcaggaggtgcaaagacagaagtattgagagaaacaccaagactctagtggaggaattaattcaatgggagatagtataaaatacatagaaaacacaagtaacagaaacctggttgaaatgcttaactagagtcaattagatgtgcaggagtaagtagtataagaagaatcaagtccgagagtgatcaggaaatgagtattaaacagtatttgaaacagagaacgtgtcccagggcccaaaagtcagaagggccccaccagccaggaaagttgtttcaatgctgtaagtaggtgtagccaagggaagccaggactatctgatatacggtagcaggggtttacggctgccaggggaaaataactcatcaagtgttggactttcaattataagatcgaatttaatttcctttccctcattctgcagcaatcagaatacacaatcttaaccactcggtccttagtggttttgttccattttgcattgggtattttcactgcctcatagagtctatttcaagtgtttggctgaaagggctttttgcatttgcatgttctgagttcagattctgctggtgcacccaagcattatgggaacaggaactcaacttagctcttccagtagaggggtgagggattctgcttttcaaattcataacattgatctttttatgcaagatttccatttacagttgaataagtacttcatatttttccatcattagacaaatacaaaatggactaaataattttaagagatagtggaggcagcagggggtacagacttccttcttagagagtgtcagagaatatgctcccaatggtggaaaggaagatttacagtctagcggctaagtacctcctacacatttcccatcaatcagaaaatagacaggtacactaaagggacctgagaactcctcttgtaatttcaacacacccaaaatcaagggcctggatgccagcagctgcagcaagcaggtttttcctccctgttgagcaagacaggtgaggcaagataggacttggctttcttacatgatgcggtaacttgtgacttgagtctttttccctaatttgctagtgggaagaaaaatagctgagctttctaaaatgatagctctctatttttaaatgaatttgaaaagtcgattaaattatgtattttattgcctctgagtatcatattaaatgaatattttattttaaaggcttaaataaatgaaaatgatttttgt

SEQ ID NO: 538 - DNA, 3927 bp, Homo sapiens
agagggcgcgcgcggctgaaagcgtgtggaggcgcgggctgcagttcggatgtctgtgtggcggggagggggcggcggccgggagagacgactccgccccctgcgcgcatgctccggccccggcgggttataaggcagcctcgctggcccggccagacaaagtggtgagctgcgacgtgactggctagctgcgtgggtactggaacaagcaaacgaggcagcgagcgaaggacgggagccggaccctgggccccgtggaactccagcctgcgccaccacgtcacgcacacgctcggcgctgcgatccgcgcatataacgatatttggatttgacctgcattttggaatttatctacacttaaaatgccaccagcagttggaggtccagttggatacacccccccagatggaggctggggctgggcagtggtaattggagctttcatttccatcggcttctcttatgcatttcccaaatcaattactgtcttcttcaaagagattgaaggtatattccatgccaccaccagcgaagtgtcatggatatcctccataatgttggctgtcatgtatggtggaggtcctatcagcagtatcctggtgaataaatatggaagtcgtatagtcatgattgttggtggctgcttgtcaggctgtggcttgattgcagcttctttctgtaacaccgtacagcaactatacgtctgtattggagtcattggaggtcttgggcttgccttcaacttgaatccagctctgaccatgattggcaagtatttctacaagaggcgaccattggccaacggactggccatggcaggcagccctgtgttcctctgtactctggcccccctcaatcaggttttcttcggtatctttggatggagaggaagctttctaattcttgggggcttgctactaaactgctgtgttgctggagccctcatgcgaccaatcgggcccaagccaaccaaggcagggaaagataagtctaaagcatcccttgagaaagctggaaaatctggtgtgaaaaaagatctgcatgatgcaaatacagatcttattggaagacaccctaaacaagagaaacgatcagtcttccaaacaattaatcagttcctggacttaaccctattcacccacagaggctttttgctatacctctctggaaatgtgatcatgttttttggactctttgcacctttggtgtttcttagtagttatgggaagagtcagcattattctagtgagaagtctgccttccttctttccattctggcttttgttgacatggtagcccgaccatctatgggacttgtagccaacacaaagccaataagacctcgaattcagtatttctttgcggcttccgttgttgcaaatggagtgtgtcatatgctagcacctttatccactacctatgttggattctgtgtctatgcgggattctttggatttgccttcgggtggctcagctccgtattgtttgaaacattgatggaccttgttggaccccagaggttctccagcgctgtgggattggtgaccattgtggaatgctgtcctgtcctcctggggccaccacttttaggtcggctcaatgacatgtatggagactacaaatacacatactgggcatgtggcgtcgtcctaattatttcaggtatctatctcttcattggcatgggcatcaattatcgacttttggcaaaagaacagaaagcaaacgagcagaaaaaggaaagtaaagaggaagagaccagtatagatgttgctgggaagccaaatgaagttaccaaagcagcagaatctccggaccagaaagacacagatggagggcccaaggaggaggaaagtccagtctgaatccatggggctgaagggtaaattgagcagttcatgacccaggatatctgaaaatattctactggcctgtaatctaccagtggtgctcaatgcaaatagtagacatttgtgtggaaatcataccagttgttcattgatgggatttttgtttgactccttaccaatagcctgaatttgaggagggaatgattggtagcaaaggatgggggaaagaagtaggttctgttttgttttgttttaatcttagcttttaatagtgtcataaagattataatatgtgccttaagttttagtctttagaactctagagagccttaacttcttaaaccatttttgctgaattcatctatttcgagtgttgtgttaaaaggaaaaataacaactaacttgtttgaggcaaatctaaaatttaaaattaatcttgcttcattgttacatgtaatatatttcagacattttcactggaagatttatgaacagaaatattggttgaaagttagagattttacaaaatgctgacaaaaatattttcctagcatcagtagatttctggcatatgtttctgctagctatatatttaggaaattcaaagcataaaactttggcaacatcttggctgttctagacacagtgtacttgtcaacccctctcaggtaccttttcttgggatgcttattagaagccaagtaaagtgcttaaggtttgttttcattaaattagctatttctgctcccctgttcaaagatgcattttgagtgtttatagatcactgccctttttgaaatcacctggtattatttttcttactggaaaagttagtattaaaatctacagaactacatatttgtgcctccttggtaaatacaacacatctaattaaatgtagacagatatttcaaacatcagctgaattcacttaagtttttccaaaacctcagttaaactgtgaagctattggaatttttttttcctggaatttttcccctttgattcacagtggtcccatttatatctgcttctagcttagtgctatgtgtgagatatgtgtgtgtttggtgtttttgtttttttgtttttttttttttaaggtttgcaaattaaaaagggccagaaaaatttggcaccaggcaaacgaataaagataggattgggaaagaagttgctaagtgtgcttagttttaataagtaattccttctcttttttcagagaaggccttacagaaaattgttgtgcttagaattgctggatgcatttttaccctccacacaaacctaaaaattttgtgacccctttcacttacctgaaaagtagagaaatggattcagtataaggataaggagggaaggtggaccagaatgaaaactgtaaatatttttttaacctaatatcacttaaatcgaggcagaaagatacagacattcaatgaattatattcaatgcatttaaaataccactgtaattgacagagtaaaagtatagatacaaaaccttgtgtaagaggctgacttttccaaataaacattttttaagaaaacatttcttctcccaaatgtctattttcttgaggaaaatattgctgtgtcttcattttcattaccaggtttcattttgggccttgctaaattgattgaattaaatcctccagcttttgaaccttgatatttgtgtatatgatttattttcatttgaatttctcctttcctcttctttgctgtaaggcaaggaggaggggaattttaaaaccatcttatttgaactgagagcatccagagcagttaaccttaaggaaacaatgaaaaactccctttgtatgcctgggcatcatggcagatagaggaagagtgttagaggagaaaactgctgctgagagtattggcaggcttggcctcagtttggactctgtaattttctttggacccaagtctgtaacctctgcgtacttcttctctcttaccttctataaaaatgaggattactgttggtgagggaataaggaatgtaagtaaaggaaatctgaaaaaataaaagtaaagcaagtataaaaaaaaaaaaaaaaaaaa

SEQ ID NO: 539 - DNA, 1940 bp, Homo sapiens
gcggtcctcgtcgcgaccggcccgggccgcaggacgccgcgctcgggggagctgagccacctctccgccaggcccgtgcgagcggtacaaagaaaagagcacttccctgctggggcagaggccaagccagagccctggccccatcacctctctgccctgcttgagtctggaatggacctccctgcctggaagctgcattgcccttggtcctgggcctgcctgccccctggggaacacaggcagcagccacattggcagtgaagccgtggcagcgtcggcagcagaggatgccccaggccctggagcgtgcagatggcagctgggcctgggtggtgctgctggccaccatggtgacccagggcctcaccctgggcttccccacgtgtatcggcatcttcttcactgaactgcaatgggagttccaggccagcaacagcgagacctcttggttcccctccatcctcacggctgtgctccacatggcagggcccctgtgcagcatcctggtgggacgcttcggctgccgagtgaccgtgatgctggggggcgtgctggccagcctgggcatggtggccagctccttctctcacaacctcagccagctctacttcacagcaggattcatcacaggcctgggcatgtgcttcagcttccagtcaagcatcacggtgctgggcttctactttgtccgccggcgggtgctggccaacgcgctggcctcgatgggcgtctccctgggcatcaccctctggccgctgctctcccgctaccttctggagaacctgggctggaggggtaccttccttgtcttcggcgggatctttctccactgctgcatctgcggggccatcataaggcctgtggccaccagtgtggcccctgagaccaaagaatgtcccccgccacctcccgagacacctgcacttggctgcctggctgcatgcggccggaccatccagcgccacctggccttcgacatcctgcggcacaacacaggctactgcgtgtacatactgggtgtgatgtggtccgtcctgggcttcccactgccacaagtcttcctggtgccatatgccatgtggcacagcgtggacgagcagcaggcagccctcctcatctccatcatcggcttcagcaacatcttcctgaggcccctagccgggctgatggcaggacggccggcctttgctagccaccgcaagtacctgttcagcctggcactcctgctcaatgggctcactaacctggtgtgtgcggcatcaggtgacttctgggtgctcgtgggctactgcctggcgtacagcgtgtccatgagtggcatcggcgccctcatcttccaggttctcatggacatcgtccccatggatcagttccccagagccctgggactcttcactgtcctggacggccttgctttcctcatctccccaccactggccgggttgctcctggacgccaccaacaactttagctatgttttctacatgtccagcttcttcctcatctcagctgccctcttcatgggtggcagcttctacgccctgcagaagaaggagcaaggcaagcaggctgtcgcggcggatgccctggagcgggatcttttcttggaagccaaagacggtcctgggaagcaacggtcccctgagatcatgtgccagtcttcccgccagccacgtccagctggcgtcaataagcatctttggggatgtcctgcctcctccaggaccagccatgagtggctcttatggccaaaggcggtactgcaggccaagcaaacggctctgggctggaatagccctacctgagtgccctgtttgactccgccactatctgccatgtgagttgggcaaattgttgaccacctctgagccttgaaaaagtaggaggttactttgttagagcaaaataataaaatttaattttaaaaaaaaaaaaaaaaa

SEQ ID NO: 540 - DNA, 3645 bp, Homo sapiens
agtttgaggccaacactaggaagtgtctggaaccggatccggaggcttcacaatctatatgttgcctccaaaggacctgcagagaaacgcctcctgattttgtcttacaatggaacttaaaaagtcgcctgacggtggatggggctgggtgattgtgtttgtctccttccttactcagtttttgtgttacggatccccactagctgttggagtcctgtacatagaatggctggatgcctttggtgaaggaaaaggaaaaacagcctgggttggatccctggcaagtggagttggcttgcttgcaagtcctgtctgcagtctctgtgtctcatcttttggagcaagacctgtcacaatcttcagtggcttcatggtggctggaggcctgatgttgagcagttttgctcccaatatctactttctgtttttttcctatggcattgttgtaggtcttggatgtggtttattatacactgcaacagtgaccattacgtgccagtattttgacgatcgccgaggcctagcgcttggcctgatttcaacaggttcaagcgttggccttttcatatatgctgctctgcagaggatgctggttgagttctatggactggatggatgcttgctgattgtgggtgctttagctttaaatatattagcctgtggcagtctgatgagacccctccaatcttctgattgtcctttgcctaaaaaaatagctccagaagatctaccagataaatactccatttacaatgaaaaaggaaagaatctggaagaaaacataaacattcttgacaagagctacagtagtgaggaaaaatgcaggatcacgttagccaatggtgactggaaacaagacagcctacttcataaaaaccccacagtgacacacacaaaagagcctgaaacgtacaaaaagaaagttgcagaacagacatatttttgcaaacagcttgccaagaggaagtggcagttatataaaaactactgtggtgaaactgtggctctttttaaaaacaaagtattttcagcccttttcattgctatcttactctttgacatcggagggtttccaccttcattacttatggaagatgtagcaagaagttcaaacgtgaaagaagaagagtttattatgccacttatttccattataggcattatgacagcagttggtaaactgcttttagggatactggctgacttcaagtggattaataccttgtatctttatgttgctaccttaatcatcatgggcctagccttgtgtgcaattccatttgccaaaagctatgtcacattggcgttgctttctgggatcctagggtttcttactggtaattggtccatctttccatatgtgaccacgaagactgtgggaattgaaaaattagcccatgcctatgggatattaatgttctttgctggacttggaaatagcctaggaccacccatcgttggttggttttatgactggacccagacctatgatattgcattttattttagtggcttctgcgtcctgctgggaggttttattctgctgctggcagccttgccctcttgggatacatgcaacaagcaactccccaagccagctccaacaactttcttgtacaaagttgcctctaatgtttagaagaatattggaagacactatttttgctattttataccatatagcaacgatattttaacagattctcaagcaaattttctagagtcaagactattttctcatagcaaaatttcacaatgactgactctgaatgaattatttttttttatatatcctattttttatgtagtgtatgcgtagcctctatctcgtatttttttctatttctcctccccacaccatcaatgggactattctgttttgctgttatacactagttcttaacattgtaaaaagtttgaccagcctcagaaggctttctctgtgtaaagaagtataatttctctgccgactccatttaatccactgcaaggcacctagagagactgctcctattttaaaagtgatgcaagcatcatgataagatatgtgtgaagcccactaggaaataaatcattctcttctctatgtttgacttgctagtaaacagaagacttcaagccagccaggaaattaaagtggcgactaaaacagccttaagaattgcagtggagcaaattggtcattttttaaaaaaatatattttaacctacagtcaccagttttcattattctatttacctcactgaagtactcgcatgttgtttggtacccactgagcaactgtttcagttcctaaggtatttgctgagatgtgggtgaactccaaatggagaagtagtcactgtagactttcttcatggttgaccactccaaccttgctcacttttgcttcttggccatccactcagctgatgtttcctgggaagtgctaattttacctgtttccaaattggaaacacatttctcaatcattccgttctggcaaatgggaaacatccatttgctttgggcacagtggggatgggctgcaagttcttgcatatcctcccagtgaagcatttatttgctactatcagattttaccactatcaaatataattcaagggcagaattaaacgtgagtgtgtgtgtgtgtgtgtgtgtgtgctatgcatgctctaagtctgcatgggatatgggaatggaaaagggcaataagaaattaatacccttatgcagttgcatttaaccttaagaaaaatgtccttgggataaactccaatgtttaatacattgattttttttctaaagaaatgggttttaaactttggtatgcatcagaattccctatagatctttttgaaaatataggtacctgggtatcacacatagaacttttaattctgctggtgtaggctgttgcccaaacatctataattttactgagctcttcaagtgattctgataacacagcctggattgagaatttttataagattggcaatggaaaaacatttattcttttaaataataatttttttaaaacccaagaggtcaggggattttataaaccaatagccaagtgttctttaaataggaggcacccttcccattgtgccaaaatcatcttttcatttattttgaaatttgtatgattattttatacttgtatgttgcctttcttcgaaggcgcctgaagcactttataaacacaaatcctcacaatacctctgtgaggtaggtaaatagtacttttctatgtagtaaacctggaatatggagaatttcataacagttcattctacttaataatgcaataatggagctccaagttgtcttggacttctacaccacactcagacttctggaaagttttctgtacctcattctttagtccctgtcaaggttagtaaataaaataagtgacataaaaaaaaaaaaactaaactacttgttgtgttgaaagttcctttttgccagttatgttcaggaaacccaataacctgaaaaagtttgactttgatgtgacatcttcatattcatcaatgctgataattgtccaaaggcatcttcactatgtctgctaaataacatccaatgtgggcgttatctgttgtctaggggatgaattttaagttacaataaaatatttttctttgttttgc

SEQ ID NO: 541 - DNA, 3297 bp, Homo sapiens
tgccggcgctctctgcgtggttcttcttctcggccgctgaaacccccgcggctgcttcctgggaaggtcgtgagtcccgctgagctgtccccggtgccgccgacccgggccgtgtgcccgtggctccagccgctgccgcctcgatctcctcgtctcccgctccgccctcccttttccctggatgaacttgcgtcctttctcttctccgccatggaattctgctccgtgcttttagccctcctgagccaaagaaaccccagacaacagatgcccatacgcagcgtatagcagtaactccccagctcggtttctgtgccgtagtttacagtatttaattttatataatatatattatttattatagcatttttgatacctcatattctgtttacacatcttgaaaggcgctcagtagttctcttactaaacaaccactactccagagaatggcaacgctgattaccagtactacagctgctaccgccgcttctggtcctttggtggactacctatggatgctcatcctgggcttcattattgcatttgtcttggcattctccgtgggagccaatgatgtagcaaattcttttggtacagctgtgggctcaggtgtagtgaccctgaagcaagcctgcatcctagctagcatctttgaaacagtgggctctgtcttactgggggccaaagtgagcgaaaccatccggaagggcttgattgacgtggagatgtacaactcgactcaagggctactgatggccggctcagtcagtgctatgtttggttctgctgtgtggcaactcgtggcttcgtttttgaagctccctatttctggaacccattgtattgttggtgcaactattggtttctccctcgtggcaaaggggcaggagggtgtcaagtggtctgaactgataaaaattgtgatgtcttggttcgtgtccccactgctttctggaattatgtctggaattttattcttcctggttcgtgcattcatcctccataaggcagatccagttcctaatggtttgcgagctttgccagttttctatgcctgcacagttggaataaacctcttttccatcatgtatactggagcaccgttgctgggctttgacaaacttcctctgtggggtaccatcctcatctcggtgggatgtgcagttttctgtgcccttatcgtctggttctttgtatgtcccaggatgaagagaaaaattgaacgagaaataaagtgtagtccttctgaaagccccttaatggaaaaaaagaatagcttgaaagaagaccatgaagaaacaaagttgtctgttggtgatattgaaaacaagcatcctgtttctgaggtagggcctgccactgtgcccctccaggctgtggtggaggagagaacagtctcattcaaacttggagatttggaggaagctccagagagagagaggcttcccagcgtggacttgaaagaggaaaccagcatagatagcaccgtgaatggtgcagtgcagttgcctaatgggaaccttgtccagttcagtcaagccgtcagcaaccaaataaactccagtggccactaccagtatcacaccgtgcataaggattccggcctgtacaaagagctactccataaattacatcttgccaaggtgggagattgcatgggagactccggtgacaaacccttaaggcgcaataatagctatacttcctataccatggcaatatgtggcatgcctctggattcattccgtgccaaagaaggtgaacagaagggcgaagaaatggagaagctgacatggcctaatgcagactccaagaagcgaattcgaatggacagttacaccagttactgcaatgctgtgtctgaccttcactcagcatctgagatagacatgagtgtcaaggcagagatgggtctaggtgacagaaaaggaagtaatggctctctagaagaatggtatgaccaggataagcctgaagtctctctcctcttccagttcctgcagatccttacagcctgctttgggtcattcgcccatggtggcaatgacgtaagcaatgccattgggcctctggttgctttatatttggtttatgacacaggagatgtttcttcaaaagtggcaacaccaatatggcttctactctatggtggtgttggtatctgtgttggtctgtgggtttggggaagaagagttatccagaccatggggaaggatctgacaccgatcacaccctctagtggcttcagtattgaactggcatctgccctcactgtggtgattgcatcaaatattggccttcccatcagtacaacacattgtaaagtgggctctgttgtgtctgttggctggctccggtccaagaaggctgttgactggcgtctctttcgtaacatttttatggcctggtttgtcacagtccccatttctggagttatcagtgctgccatcatggcaatcttcagatatgtcatcctcagaatgtgaagctgtttgagattaaaatttgtgtcaatgtttgggaccatcttaggtattcctgctcccctgaagaatgattacagtgttaacagaagactgacaagagtctttttatttgggagccagaggagggaagtgttacttgtgctataactgcttttgtgctaaatatgaattgtctcaaaattagctgtgtaaaatagcccgggttcctttggctcctgctgaggtcccctttccttctgggctgtgaattcctgtacatatttctctactttttgtatcaggcttcaattccattatgttttaatgttgtctctgaagatgacttgtgatttttttttcttttttttaaaccatgaagagccgtttgacagagcatgctctgcgttgttggtttcaccagcttctgccctcacatgcacagggatttaacaacaaaaatataactacaacttcccttgtagtctcttatataagtagagtccttggtactctgccctcctgtcagtagtggcaggatctattggcatattcgggagcttcttagagggatgaggttctttgaacacagtgaaaatttaaattagtaacttttttgcaagcagtttattgactgttattgctaagaagaagtaagaaagaaaaagcctgttggcaatcttggttatttctttaagatttctggcagtgtgggatggatgaatgaagtggaatgtgaacttcgggcaagttaaatgggacagccttccatgttcatttgtctacctcttaactgaataaaaaagcctacagtttttagaaaaaaaaaaaaaaa

SEQ ID NO: 542 - DNA, 1342 bp, Homo sapiens
agggaagtggggtggctccccatggcttctcccggggctggcactgaagctggagcacaggatgtgctgacgggggtccagaggcagagtccttaacttactcagcttaagcgtggcatggagtcccaactgggaggggccctggcagcatgaaacccccacccccactctctgcgacggcccagatggagggcaggaggaacagcggttcagccctggctggggctgcaggggctggggtgtgttactcactggcacgatggagaactgcatgaagaggcagcggagtgctgtctgtccccacccttccccgcccggcctccaactggtgggaactggattttgcggctgcagaggacttccccaaattttgccacattaacagctgactgcacacctgagccccgaggtgaagcagggcctcaggtagccagggaactggttgagcagaggaaatcggagagacctttttttttgtcatgaacaggctcagtgtgaatgggggaacttcctggttctgagggaatgtgggaaaattgccctttaggctgggtgaagaagaaagcaagtggaaccctggcacccctggacttcctcctccagaggaagcggctttggttgtgggccagcgagcctgtgcgtccccagccccagggcattcaccgcttcagagaagcaaggcgacagttctgccggatgagaggatccaggctgactggaggaaggaagggctttggctcatctgggctcaggtttgggagagatggcttctcagaggaggtgatgcctcagccagtcttaaaggcaatgcggtgtgcagagggtgcttggtggttctctcctgatggccccgcagggtctgcagcctccatctggccagcagaaggcgcagaaagactgcctgggcagctcggacgtgaccgcctggaagtggtgtacagcgttcctgacaacgttcccggccaaaacgggtcccgccgcccacttgtgtgcaagataactggaaaatgtctttctgtgtgctccgaggagaatgcaaaggctggtggatgtagtgcctttcctctactgctctctcagctgggggcaagaatgacaggacgtgaacatgcacacaagggcccggaactcacgacccccgacagcggtctcccccgcccccccaaccccgcgcttgcaggatttagggcactagcacagcacagtccaccccttgggactagcaccccctccgcagttctgctctctgcagcaacatagagtacaaatattgttccttttgtttcttttttccctttggatacatttttaattacaaaaatagagcttgattgttgcacct

SEQ ID NO: 543 - DNA, 2338 bp, Homo sapiens
ggcctttgtcaagtcatcccctcttctcctcaggaactgctcaaacctgtgccccaaagatgagggcccaggaggacctcgagggccggacacagcatgaaaccaccagggacccctcgaccccgctacccacagagcctaagtttgacatgttgtacaagatcgaggacgtgccaccttggtacctgtgcatcctgctgggcttccagcactacctgacatgcttcagtggtaccatcgccgtgcccttcctgctggctgaggcgctgtgtgtgggccacgaccagcacatggttagtcagctcatcggcaccatcttcacgtgcgtgggcatcaccactctcatccagaccaccgtgggcatccggctgccgctgttccaggccagtgcctttgcatttctggttccagccaaagccatactggctctggagagatggaaatgccccccggaagaggagatctacggtaactggagtctgcccctgaacacctctcatatttggcacccacggatacgggaggtgggtttgcatgtccagggtgcaatcatggtgtccagcgtggtggaggtggtgattggcctgctggggctgcctggggccctgctcaactacattgggcctctcacagtcacccccactgtctccctcattggcctttctgtcttccaagctgctggcgaccgagctggctcccactggggcatctcagcttgctccattctcctgatcatcctcttctcccagtacctgcgcaacctcaccttcctgctgcctgtctaccgctggggcaagggcctcactctcctccgcatccagatcttcaaaatgtttcctatcatgctggccatcatgaccgtgtggctgctctgctatgtcctgaccttgacagacgtgctgcccacagacccaaaagcctatggcttccaggcacgaaccgatgcccgtggtgacatcatggctattgcaccctggatccgcatcccctacccctgtcagtggggcctgcccacggtgactgcggctgctgtcctgggaatgttcagcgccactctggcaggcatcattgagtccatcggagattactacgcctgtgcccgcctggctggtgcaccaccccctccagtacatgctatcaacaggggcatcttcaccgaaggcatttgctgcatcatcgcggggctattgggcacgggcaacgggtccacctcgtccagtcccaacattggcgtcctgggaattaccaaggtgggcagccggcgcgtggtgcagtatggtgcggctatcatgctggtcctgggcaccatcggcaagttcacggccctcttcgcctcgctccctgaccccatcctggggggcatgttctgcactctctttggcatgattacagctgtggggctgtccaacctgcaatttgtggacatgaactcctctcgcaacctcttcgtgctgggattttccatgttcttcgggctcacgctgcccaattacctggagtccaaccctggcgccatcaatacaggcattcttgaagtggatcagattctgattgtgctgctgaccacggagatgtttgtgggcgggtgccttgctttcatacttgacaacacagtgccagggagcccagaggagcgtggtctgatacagtggaaagctggggctcatgccaacagtgacatgtcttccagcctcaagagctacgatttccccattgggatgggcatagtaaaaagaattacctttctgaaatacattcctatctgcccagtcttcaaaggattttcttcaagttcaaaagatcagattgcaattccagaagacactccagaaaatacagaaactgcatctgtgtgcaccaaggtctgaaaaatgacttccaggaaaggaagcatggtatataacaggaaaagaaaactacatggggaaccagaagacctaagcctgaaatcccagccctgcccctaactaacttctgtgtaaactcagataagtcacctttctctgggattcaaatttttgcatcagttaaaaaaaaaggggtgggggggaatgggccaaagtctgagtcttagagacttgtaccaatgttatgctatgtctctaaatctttactctcctaagtagacttgtcagcatctaggaagaacagctagaaattttcctctgtgatattttagactgcaagttgaaaaaaataaaaagaaatgagggcaggttccagggcctgaaatgtaggtatgctgcaaggcttttacattgaatttgaccctacatcacttcaagactaatgcataatattaaacatcatgttgaagaaaaaaaaaaaaaaaaaaaaa

SEQ ID NO: 544 - DNA, 2326 bp, Homo sapiens
ggcctttgtcaagtcatcccctcttctcctcaggaactgctcaaacctgtgccccaaagatgagggcccaggaggacctcgagggccggacacagcatgaaaccaccagggacccctcgaccccgctacccacagagcctaagtttgacatgttgtacaagatcgaggacgtgccaccttggtacctgtgcatcctgctgggcttccagcactacctgacatgcttcagtggtaccatcgccgtgcccttcctgctggctgaggcgctgtgtgtgggccacgaccagcacatggttagtcagctcatcggcaccatcttcacgtgcgtgggcatcaccactctcatccagaccaccgtgggcatccggctgccgctgttccaggccagtgcctttgcatttctggttccagccaaagccatactggctctggagagatggaaatgccccccggaagaggagatctacggtaactggagtctgcccctgaacacctctcatatttggcacccacggatacgggaggtccagggtgcaatcatggtgtccagcgtggtggaggtggtgattggcctgctggggctgcctggggccctgctcaactacattgggcctctcacagtcacccccactgtctccctcattggcctttctgtcttccaagctgctggcgaccgagctggctcccactggggcatctcagcttgctccattctcctgatcatcctcttctcccagtacctgcgcaacctcaccttcctgctgcctgtctaccgctggggcaagggcctcactctcctccgcatccagatcttcaaaatgtttcctatcatgctggccatcatgaccgtgtggctgctctgctatgtcctgaccttgacagacgtgctgcccacagacccaaaagcctatggcttccaggcacgaaccgatgcccgtggtgacatcatggctattgcaccctggatccgcatcccctacccctgtcagtggggcctgcccacggtgactgcggctgctgtcctgggaatgttcagcgccactctggcaggcatcattgagtccatcggagattactacgcctgtgcccgcctggctggtgcaccaccccctccagtacatgctatcaacaggggcatcttcaccgaaggcatttgctgcatcatcgcggggctattgggcacgggcaacgggtccacctcgtccagtcccaacattggcgtcctgggaattaccaaggtgggcagccggcgcgtggtgcagtatggtgcggctatcatgctggtcctgggcaccatcggcaagttcacggccctcttcgcctcgctccctgaccccatcctggggggcatgttctgcactctctttggcatgattacagctgtggggctgtccaacctgcaatttgtggacatgaactcctctcgcaacctcttcgtgctgggattttccatgttcttcgggctcacgctgcccaattacctggagtccaaccctggcgccatcaatacaggcattcttgaagtggatcagattctgattgtgctgctgaccacggagatgtttgtgggcgggtgccttgctttcatacttgacaacacagtgccagggagcccagaggagcgtggtctgatacagtggaaagctggggctcatgccaacagtgacatgtcttccagcctcaagagctacgatttccccattgggatgggcatagtaaaaagaattacctttctgaaatacattcctatctgcccagtcttcaaaggattttcttcaagttcaaaagatcagattgcaattccagaagacactccagaaaatacagaaactgcatctgtgtgcaccaaggtctgaaaaatgacttccaggaaaggaagcatggtatataacaggaaaagaaaactacatggggaaccagaagacctaagcctgaaatcccagccctgcccctaactaacttctgtgtaaactcagataagtcacctttctctgggattcaaatttttgcatcagttaaaaaaaaaggggtgggggggaatgggccaaagtctgagtcttagagacttgtaccaatgttatgctatgtctctaaatctttactctcctaagtagacttgtcagcatctaggaagaacagctagaaattttcctctgtgatattttagactgcaagttgaaaaaaataaaaagaaatgagggcaggttccagggcctgaaatgtaggtatgctgcaaggcttttacattgaatttgaccctacatcacttcaagactaatgcataatattaaacatcatgttgaagaaaaaaaaaaaaaaaaaaaaa

SEQ ID NO: 545 - DNA, 2036 bp, Homo sapiens
caaggcagcatgagccgatcacccctcaatcccagccaactccgatcagtgggctcccaggatgccctggcccccttgcctccacctgctccccagaatccctccacccactcttgggaccctttgtgtggatctctgccttggggcctcagctgtcttctggctctgcagcatgtcttggtcatggcttctctgctctgtgtctcccacctgctcctgctttgcagtctctccccaggaggactctcttactccccttctcagctcctggcctccagcttcttttcatgtggtatgtctaccatcctgcaaacttggatgggcagcaggctgcctcttgtccaggctccatccttagagttccttatccctgctctggtgctgaccagccagaagctaccccgggccatccagacacctggaaactcctccctcatgctgcacctttgtaggggacctagctgccatggcctggggcactggaacacttctctccaggaggtgtccggggcagtggtagtatctgggctgctgcagggcatgatggggctgctggggagtcccggccacgtgttcccccactgtgggcccctggtgctggctcccagcctggttgtggcagggctctctgcccacagggaggtagcccagttctgcttcacacactgggggttggccttgctcacctgggctcctgccagtttcatgtgtgcccctggaggcgagcttcaacgtcatcaactcacactcctctccctgtcttccggctcctttcggaactgtctgcccccaccaaggcaccatggatttggctgcctcacccaggctggatctcagcaagtggctcacttagtggggctactctgcgtggggcttggactctcccccaggttggctcagctcctcaccaccatcccactgcctgttgttggtggggtgctgggggtgacccaggctgtggttttgtctgctggattctccagcttctacctggctgacatagactctgggcgaaatatcttcattgtgggcttctccatcttcatggccttgctgctgccaagatggtttcgggaagccccagtcctgttcagcacaggctggagccccttggatgtattactgcactcactgctgacacagcccatcttcctggctggactctcaggcttcctactggagaacacgattcctggcacacagcttgagcgaggcctaggtcaagggctaccatctcctttcactgcccaagaggctcgaatgcctcagaagcccagggagaaggctcaagtgtacagacttcctttccccatccaaaacctctgtccctgcatcccccagcctctccactgcctctgcccactgcctgaagaccctggggatgaggaaggaggctcctctgagccagaagagatggcagacttgctgcctggctcaggggagccatgccctgaatctagcagagaagggtttaggtcccagaaatgaccagaacgcctacttctgccctggttaatttagccctaactctcatctgctggagagtcagctcccaaactgttctttcttgtaggcagaggatatgtgtgtgtgtattacatgggactgtctagaggttccatttcccaatagggtgggttgcctttccttgtcttaattaggcctaactgttccagagcagaggccatgatttagtggaccatgaatgattgagattttgcctgtgtactatcaatgccacttgaaccccagcattcactttaatacttactgagcatctcccatgtgcaaggtcctggaactacagggataagacagggtccatgccgtctcaaggcatttacggtttaaaaagacctttgtaattactaacgaaaatgcaaagcagaaagcagtctgtaataaagattaaaataatgccgtgggagcaaaaaaaaaaaaaaaaaaaaaaaaaaaaaaaaaaaaaaaaaaaaaaaaaaaaaaaaaaaaaaaaaaaaaaaaaaaaaaaaaaaaaaaaaaaaaaaaaaaaaaaaaaa

SEQ ID NO: 546 - DNA, 3905 bp, Homo sapiens
gcgacgaggagggcgacgacgaggagacgggcagcggcgaggaggaggaagaggaggcggaggcggcggccgggtgggagcgcagcgaggacgcgcggctgctgcgcgcagggctgcctcctgccgctgtccccgccgcggccgcccgcgacaggagcggccgccgcccgccgaggccgccgcccggccgcccgaggatgcggccgtccggcgacgaggaccgcgcgcgtcgccgccgccgccgccgccgccggagggaccttctgctgagccagctctgcttcctggcctcggtggcgctgctgctctggtcgctgtcgagcctgcgagagcagaaggagcttgacctcatggacctcgtaggggaagacagaaagtggatgatggcgaggaagctgatgcaggtgaacgacactctgacttccgaagatgccggactccggaacagcaagaactgcaccgaaccagccctgcatgaattccccaatgacatcttcacaaacgaggatagaagacaaggtgcggtggtcctccatgtgctctgtgccatatacatgttctatgcgctggccattgtgtgtgatgacttcttcgtcccttccttggaaaagatctgtgagcgcctgcacctcagtgaagatgtggctggggccacattcatggcagcgggaagttcggccccagagctgttcacatcggtcataggggtcttcatcaccaaaggcgatgtgggagttggcaccatcgtgggctcagcggtattcaacatcctgtgcatcattggtgtctgtgggctctttgctgggcaggttgtggctctttcctcctggtgcctgctgagggattctatttactacacgctgtctgtgatcgcgctcatcgtgtttatttatgatgaaaaagtttcctggtgggagtctttagtccttgtgctgatgtatcttatctacattgtcatcatgaaatataacgcttgcatacatcagtgctttgagaggaggacaaaaggtgccgggaacatggtcaacggattggccaacaatgctgaaattgatgacagcagcaactgcgacgcaactgtggtgctacttaagaaagcaaatttccaccgcaaagcatcagtgatcatggtagacgagctgctgtcagcctacccacaccagctttccttctctgaggctggccttcgaatcatgataaccagccactttccccccaagacccggctctccatggccagtcgcatgttgatcaatgagagacaaagattgataaacagcagggcttataccaacggggaatctgaggtggccatcaaaatcccaattaagcacaccgtggagaatgggacagggcccagcagtgccccagacaggggcgtgaatgggacacggagggacgatgttgtggctgaggctggcaacgaaacagagaatgaaaatgaggacaatgagaatgatgaggaggaagaggaggacgaggatgatgatgaaggaccgtacacaccattcgacaccccctcgggtaaactggaaacagtgaaatgggcgttcacctggccgctgagtttcgtcttatacttcactgtacccaactgcaacaagccgcgctgggagaaatggttcatggtgacgtttgcttcctccacgctgtggatcgcagccttctcctacatgatggtgtggatggtcacaatcattggttacaccctggggattcctgacgtcatcatggggatcaccttcctggctgctgggaccagcgtgcctgactgcatggccagcctcattgtggccagacaagggatgggggacatggctgtgtccaactccattgggagcaacgtgtttgacatcctgattggcctcggtctcccctgggctctgcagaccctggctgtggattacggatcctacatccggctgaatagcagggggctgatctactccgtaggcttgctcctggcctctgtttttgtcacggtgttcggcgtccacctgaacaagtggcagctggacaagaagctgggctgtgggtgcctcctcctgtatggtgtgttcctgtgcttctccatcatgactgagttcaacgtgttcacctttgtgaacctgcccatgtgcggggaccactgagccgccgggtgcccacagaggctcagctccttcttttctgtgcaatacgagacccggccgcaccccgagtcacacaggcccccggggccacggcgttcgtctctcctgtgctgtcctcaggcctccgctcctgttttggtggcccaggctctcccctgacccatcctcgctcccccacctccttgggtcatgcccacccaccctttcctgcctcctccgtgtgaagacatccaacatccacgtgacttttccagctccatttttgaacagtgactgagattctagaaaaactggctgctaactggcctgagccaggcaacactgattccaatccctcctccttttttaagttatttgatggaagactcacctaatttgtgacctgagactgttgaagaaatagagaggagggggcccgttgattacagagagcatttgggattttgtttggtttggagatgatgcctaggttactgggtttggggggattgttttcttttgggggccttccccttttactccttttcttccagagatcaagagcttctcttgcatcttcttccactgggctctggattaatcaattacccaaaggctgcacctgccgtgttgtctgggcttgcatcccagatgtgttggagtatgcatggatgtagtgctttttagaggagccactgggcaaggccaccaagaacaaatgcatgacattttatagccaaggacgcctcgctaaagtcttatgggcgtcccctggggttgggggggcacaaggttttggaggaagaagacaacttccctcattccatcatcaccatctctttctcactaggttctttctagttttcaagcaatagttctagcctgccttggacaagggggccccagttaaacaaactacccatccatgagctgccaggcagtcaaaaacagaagcttccccgacttgtgagtccctgagatgtgctcttgttgtttggcatttggggtgacagggagtgacccagaggccaccactgcttttcatgcaggagttacagacactggtttcttggaaaatggagagaagcgcactttgcacagacgtcgtcaattaagtcccaatttgccacttggtattgagtacactggaccctgaccactggctcttgggcaaacgtccttcctcacggggcgcctccgccaagccggcccagctgcacccctcccttcctggagggatggccagggaaggagaaaacagagaactgacacctttgaaaccacagaatgtgttacatgcagactcgctcaagggcataagttattgtgaacgtttttgccaatcactgctcaacagccctgctagattttgtatgatgctgaattattatgcagactaattccacccagttgagacacaccatgcttgttcacttgtatttattgaaactgtggattcttgcccgtgctgtcccttgtatttactttaagcactgatcacttatcattcattcggtatggttttccctgtcccttgtacacattctggtatgaatttgtaaaaataacctgctacaaattggttgaatgtttctgtctgtggtgcgaaccagcattaacggatggggcacgtgcccaactgaggaacaggagaagaaatcaccaatttgggctctcagagctaagacacacttattgattctgttgcacattttgcactggtttatggcgattgttttcttggacggatagtgtaaaataaacttctctgttctctaaaaaaaaaaaaaaaaa

SEQ ID NO: 547 - DNA, 3172 bp, Homo sapiens
caggcagccacaggcctgtcagaccaggacccttaccctctagacatggcctcggtcccctgcaaaccccagccccgtagccctgcgaggttacagacagcctaaacgccaccaccacagggcctgtgccgtgcccctgacccgggcacagaaggccactggcccggaggccatggagacggtgcccccagcagtggacctggtgctgggtgcttctgcctgctgcctggcctgtgtcttcaccaaccccctggaggtggtgaagacgcggctgcagctgcagggggagctgcaggcccggggcacctacccacggccctaccatggcttcatagcctctgtcgctgctgtggcccgagcagacgggctgtggggcctgcagaaggggctggctgccggccttctgtaccaaggcctcatgaatggcgttcgtttctactgctacagcctggcgtgccaggctggcctcacgcagcaaccaggtggcaccgtggttgcgggagccgtggcgggggcactgggagccttcgtggggagccctgcttacctgatcaaaacgcagctgcaagctcagacagtggccgcagtggccgtgggacaccagcacaatcaccagactgtcctgggtgccttggagaccatctggcggcagcaagggctcttggggctgtggcagggcgttggtggggctgtgccccgagtcatggtgggctcagctgcccagctggccaccttcgcctctgccaaggcctgggtacagaagcaacagtggctccctgaggacagctggctggtggccctggctgggggcatgatcagcagcatagccgtggttgtcgtcatgactcccttcgatgtggtcagcacgcggctatacaatcagccggtggacacagctggcaggggccagctctatgggggcctcaccgactgcatggtgaagatctggcggcaggagggccccctggcactctacaagggcctgggccccgcctacctgcgcctgggcccccacaccatcctcagcatgctcttctgggacgagcttcggaaactggctgggcgggcccagcacaagggcacctagacgacggccctcacccccacgtcctgacacggccggcacttggccggaagtgagagcctgctccaggacaactggctgtcccggggcgggccatgggcccaggccctgccagaggtcccgggagagtgtggacagctctggtccatccagccccttggcccacccaggtccagagcatccacttcaagttaccacccattctgtcttccagacagttctcttccttctctgtactgcgtactgggtcaccacatcccagagccttgctcagttatagcaactgctgcgggcgtgcacatggcataggcccagtaacttacatacatcggctcacttaggcctcagacagcagcacgaggcaggcacttttacttcttttaccattagaaagccaaggcctagagtggtgggctttgaccacagccacacaattttgaagtggcagagccaggactggagcttagccctgctcaccctagacctatgcgcttgacaagtgcgtgactgtgacaggcccatgggcccggactgcccataggggtcactgtaccatggcaaaggctgaggtgcaccaggaggctgtggcgtcgtcacctgccttatttgctggagaagctgtagcaaagaaccacagactgggcgacttagacaatagaaatgtattttctcacagttctggaggctggatgctggagaccaaggtgtcagtgggctggtttcttctgaggcctctgtccatggcttgcagatgctgctttctctctgtgtctgcacatggtggtccctcgatgtgcgtctgggtcctgatctcctcctcttataaggacacaaatcatgttggcttagggcccaccctcatgaccccactttaatttttttttttttttttgagatgaagtctcactctgccacccaagctggagtgcagtggcacgatctcggttcactgcaaccttggcctcctaggttcaagcaattctcctgccccagcctcctgagtagctgggattacaggtgtgtgccaccacacccggccaatttttgtatctttagtagagatggggttttgccatgttggccagactggtctcgaactcctgacctcaagtgatccactggccttggcctcccaaagtgctgggattacaggcatgagccacctcacttggcccaattttaacttaattatctctgtcaagagcctatctccatatacagtcacatcctgagctactagggggtaggacttcaacatgcacttctgcaggggccgcagttcagccaacatcatctttttttttgagatggagtctcgctttgttgcccaggctggagtgcggtggtgcaatctcggctcaccacaacctccacctcccaggttcaagtgattctcctgcctcagcctcccgagttgctgggactataggtgtgcgccaccatgcccagctaattttgtatttttagtagagacaggctttcgctgtgttggccaggctggtcttgaatgcctgaccttgccgcccgcctcggcctcccaaaatgctgggattacaggcgtgagccaccgcgcctggcctcagccaacatcatctaagggctctcacggagggcctcccagctgcccgccctgtgggcatttgcacatatcctgacaagcctgaaagaagctccgggtgcccattgttcagtccaggtgcccattgttcccgggactgaggcccgggaaagggaagcgacgtgatagggccagcagcagaccctgggcctttctctagactgagcaccattccccgtgggtgtgctctcagcgccgcaccgaccttcacactgcagagatggatgccaactccctggcaggggcaggactgctgccgagcagccccacctgccctcccagccacaccccaagtctgtaagggccgctcccaggaacacctgctactgcacactccaaaccaataaagttttatattttgtttacttaaaaaaaaaaaaaaaaaaaaaaaaaaaaaaaaaaaaaaaaaaaaaaaaaaaaaaaaaaaaaaaaaaaaaaaaaaaaaaaaaaaaaaaaaaaaaaaaaaaaaa

SEQ ID NO: 548 - DNA, 1791 bp, Homo sapiens
gatccgtgcggccagggtagctatcgcggcggcggcggcggcggcggttgaactgactcggagcgaggagacccgagcgagcagacgcggccctggcgcccgccctgcgcactcaccatggcgatgcatttcatcttctcagatacagcggtgcttctgtttgatttctggagtgtccacagtcctgctggcatggccctttcggtgttggtgctcctgcttctggctgtactgtatgaaggcatcaaggttggcaaagccaagctgctcaaccaggtactggtgaacctgccaacctccatcagccagcagaccatcgcagagacagacggggactctgcaggctcagattcattccctgttggcagaacccaccacaggtggtatttgtgtcactttggccagtctctaatccatgtcatccaggtggtcatcggctacttcatcatgctggccgtaatgtcctacaacacctggattttccttggtgtggtcttgggctctgctgtgggctactacctagcttacccacttctcagcacagcttagctggtgaggaacgtgcaggcactgaggctggagggacatggagccccctcttccagacactatacttccaactgccctttcttctgatggctattcctccaccttattcccagcccctggaaactttgagctgaagccagcacttgctccctggagttcggaagccattgcagcaaccttccttctcagccagcctacgtagggcccaggcatggtcttgtgtcttaagacagctgctgtgaccaaagggagaatggagataacaggggtggcagggttactgagcccatgacaatgcttctctgtgactcaaaccaggaatttccaaagatttcaagccagggagaagggttcttggtgatgcagggcatggaacctggacaccctcagctctcctgctttgtgccttatctacaggagcatcgcccattggacttcctgacctcttctgtctttgagggacagagaccaagctagatcctttttctcacctttctgcctttggaacacatgaagatcatctcgtctatggatcatgttgacaaactaagttttttttatttttcccattgaactcctagttggcaattttgcacattcatacaaaaaaatttttaatgaaatgatttcattgattcatgatggatggcagaaactgctgagacctatttccctttcttggggagagaataagtgacagctgattaaaggcagagacacaggactgctttcaggctcctggtttattctctgatagactgagctccttccaccagaaggcactgcctgcaggaagaagatgatctgatggccgtgggtgtctgggaagctcttcgtggcctcaatgccctcctttatcctcatctttcttctatgcagaacaaaaagctgcatctaataatgttcaatacttaatattctctatttattacttactgcttactcgtaatgatctagtggggaaacatgattcattcacttaaaatactgattaagccatgggcaggtactgactgaagatgcaatccaaccaaagccattacattttttgagttagatgggactctctggatagttgaacctcttcactttataaaaaaggaaagagagaaaatcactgctgtatactaaatacctcacagattagatgaaaagatggttgtaagctttgggaattaaaaacaaacaaatacattttagtaaatatatatttttaaatagtctaaaaaaaaaaaaaaaaaa

SEQ ID NO: 549 - DNA, 2493 bp, Homo sapiens
ccctccgggcaggggaggtaggcctgggcctgacgccggccacgcagcggcgggagagtgagcactcgggcggcggcgtcctggagacccgcgagagatggaagcggcggcgacgccggcggctgccggggcggcgaggcgcgaggagctagatatggatgtaatgaggcccttgataaatgagcagaattttgatgggacatcagatgaagaacatgagcaagagcttctgcctgttcagaagcattaccaacttgatgatcaagagggcatttcatttgtacaaactcttatgcaccttcttaaaggaaatattggaactggccttttaggacttccattggcaataaaaaatgcaggcatagtgcttggaccaatcagccttgtgtttataggaattatttctgttcactgtatgcacatattggtacgttgcagtcactttctatgtctgaggtttaaaaagtcaacattaggttatagtgacactgtgagctttgctatggaagtgagtccttggagttgtcttcagaagcaagcagcatgggggcggagtgtggttgacttttttctggtgataacacagctgggattctgtagtgtttatattgtcttcttagctgaaaatgtgaaacaagttcatgaaggattcctggagagtaaagtgtttatttcaaatagtaccaattcatcaaacccttgtgagagaagaagtgttgacctaaggatatatatgctttgctttcttccatttataattcttttggtcttcattcgtgaactaaagaatctatttgtactttcattccttgccaacgtttccatggctgtcagtcttgtgataatttaccagtatgttgtcaggaacatgccagatccccacaaccttccaatagtggctggttggaagaaatacccactcttttttggtactgctgtatttgcttttgaaggcataggagtggtccttccactggaaaaccaaatgaaagaatcaaagcgtttccctcaagcgttgaatattggcatggggattgttacaactttgtatgtaacattagctactttaggatatatgtgtttccatgatgaaatcaaaggcagcataactttaaatcttccccaagatgtatggttatatcaatcagtgaaaattctatattcctttggcatttttgtgacatattcaattcagttctatgttccagcagagatcattatccctgggatcacatccaaatttcatactaaatggaagcaaatctgtgaatttgggataagatccttcttggttagtattacttgtgccggagcaattcttattcctcgtttagacattgtgatttccttcgttggagctgtgagcagcagcacattggccctaatcctgccacctttggttgaaattcttacattttcgaaggaacattataatatatggatggtcctgaaaaatatttctatagcattcactggagttgttggcttcttattaggtacatatataactgttgaagaaattatttatcctactcccaaagttgtagctggcactccacagagtccttttctaaatttgaattcaacatgcttaacatctggtttgaaatagtaaaagcagaatcatgagtcttctatttttgtcccatttctgaaaattatcaagataactagtaaaatacattgctatatacataaaaatggtaacaaactctgttttctttggcacgatattaatattttggaagtaatcataactctttaccagtagtggtaaacctatggaaaatccttgcttttaagtgttagcaatagttcaaaaaattaagttctgaaaattgaaaaaattaaaatgtaaaaaaattaaagaataaaaatacttctattattcttttatctcagtaagaaataccttaaccaagttatctctcttttatgctactcttttgccactcacttgagaacagaataggatttcaacaataagagaataaaataagaacatgtataacaaaaagctctctccagatcatccctgtgaatgccaaagtaaactttatgtacagtgtaaaaaaaaaaaatctcagttatgtttttattagccaaattctaatgattggctcctggaagtatagaaaactcccattaacataatataagcatcagaaaattgcaaacactagaattaattttacactctaatggtagttgatcttcatagtcaagaggcactgttcaagatcatgacttagtgtttcaatgaaatttgaaaagggactttaaaacttatccagtgcaactcccttgtttttcgtcagaggaaaaggaggcctagaaaggttaagtaacttggtcgagaccactcagccttgagatcaagaaaacctaatcttttgactcccaggccaggatgttttatttctcacatcatgtccaagaaaaagaataaattatgttcagcttaaaaaaaaaaaaaaaaaaaaaaaaaaaaaa

SEQ ID NO: 550 - DNA, 1895 bp, Homo sapiens
gtctacagcaaggcctaataggggacctgagggcacagtcctcaggatgtttcggggagaataggagccagaacctgagcccctaagccattcccctcaccaatgatggggtccccagtgagtcatctgctggccggcttctgtgtgtgggtcgtcttgggctgggtagggggctcagtccccaacctgggccctgctgagcaggagcagaaccattacctggcccagctgtttggcctgtacggcgagaatgggacgctgactgcagggggcttggcgcggcttctccacagcctggggctaggccgagttcaggggcttcgcctgggacagcatgggcctctgactggacgggctgcatccccagctgcagacaattccacacacaggccacagaaccctgagctgagtgtggatgtctgggcagggatgcctctgggtccctcagggtggggtgacctggaagagtcaaaggcccctcacctaccccgtgggccagccccctcgggcctggacctccttcacaggcttctgttgctggaccactcattggctgaccacctgaatgaggattgtctgaacggctcccagctgctggtcaattttggcttgagccccgctgctcctctgacccctcgtcagtttgctctgctgtgcccagccctgctttatcagatcgacagccgcgtctgcatcggcgctccggcccctgcacccccaggggatctactatctgccctgcttcagagtgccctggcagtcctgttgctcagcctcccttctcccctatccctgctgctgctgcggctcctgggacctcgtctactacggcccttgctgggcttcctgggggccctggcggtgggcactctttgtggggatgcactgctacatctgctaccgcatgcacaagaagggcggcacgcaggacctggcggactaccagagaaggacctgggcccggggctgtcagtgctcggaggcctcttcctgctctttgtgctggagaacatgctggggcttttgcggcaccgagggctcaggccaagatgctgcaggcgaaaacgaaggaatctcgaaacacgcaacttggatccggagaatggcagtgggatggcccttcagcccctacaggcagctccagagccaggggctcagggccagagggagaagaacagccagcacccaccagctctggcccctcctgggcaccaaggccacagtcatgggcaccagggtggcactgatatcacgtggatggtcctcctgggagatggtctacacaacctcactgatgggctggccataggtgctgccttctctgatggcttctccagcggcctcagtaccaccttagcggtcttctgccatgagctgccccacgaactgggtgactttgccatgctgctccagtcagggctgtcctttcggcggctgctgctgctgagcctcgtgtctggagccctgggattggggggtgcagtcctgggggtggggctcagcctgggccctgtccccctcactccctgggtgtttggggtcactgctggggtcttcctctatgtggcccttgtggacatgctaccagccctgcttcgtcctccggagcccctgcctacgccccatgtgctcctgcaggggctggggctgctgctggggggcggcctcatgcttgccataaccctgctggaggagcggctactgcccgtgaccactgagggctgatggggccagtggaaaggggtcgggttgcccttccttccccccaaccacaggaatggaggcgggacacagggccagtaggagcaataggattttaataaacagaacccatcccaaaaaaaaaaaaaaaaaaaaaaaaaaaaaaaaaaaaaaaaaaaaaaaaaaaaaaaaaa

SEQ ID NO: 551 - DNA, 4520 bp, Homo sapiens
taggaacaggggagagtgcacctgctaccagtcaagctcagccagactgcaagaggaggcgaggcggagccagccgagggagtgaaccatggacaagttgaaatgcccgagtttcttcaagtgcagggagaaggagaaagtgtcggcttcatcagagaatttccatgttggtgaaaatgatgagaatcaggaccgtggtaactggtccaaaaaatcggattatcttctatctatgattggatacgcagtgggattaggaaatgtgtggagatttccatatctgacctacagcaatggtggaggcgccttcttgataccttatgcaattatgttagcattggctggtttacctttgttctttctggagtgttcactgggacaatttgctagcttaggtccagtttcagtttggaggattcttccattgtttcaaggtgtgggaattacaatggtcctgatctccatttttgtgacaatctattacaatgtcataattgcctatagtctttactacatgtttgcttcttttcaaagtgaactaccatggaaaaattgttcttcgtggtcagataaaaactgtagcagatcaccaatagtaactcactgtaatgtgagtacagtgaataaaggaatacaagagatcatccaaatgaataaaagctgggtagacatcaacaattttacctgcatcaacggcagtgaaatttatcagccagggcagcttcccagtgaacaatattggaataaagtggcgctccaacggtcaagtggaatgaatgagactggagtaattgtttggtatttagcactttgtcttcttctggcttggctcatagttggagcagcactatttaaaggaatcaaatcgtctggcaaggtggtatattttacagctcttttcccctatgtggtcctactcatcctgttagtacgaggtgcaactctggagggtgcttcaaaaggcatttcatactatattggagcccagtcaaattttacaaaacttaaggaagctgaggtatggaaagatgctgccactcagatattttactccctttcagtggcttggggtggcttagttgctctatcatcttacaataagttcaaaaacaactgcttctctgatgccattgtggtttgtttgacaaactgtctcactagcgtgtttgctggatttgctattttttctatattgggacacatggcccatatatctggaaaggaagtttctcaagttgtaaaatcaggttttgatttggcattcattgcctatccagaggctctagcccaactcccaggtggtccattttggtccatattattttttttcatgcttttaactttgggtctcgattctcagtttgcttcgattgaaacgatcacaacaacaattcaagatttatttcccaaagtgatgaagaaaatgagggttcccataactttgggctgctgcttggttttgtttctccttggtctcgtctgtgtgactcaggctggaatttactgggttcatctgattgaccacttctgtgctggatggggcattttaattgcagctatactggagctagttggaatcatctggatttatggagggaacagattcattgaggatacagaaatgatgattggagcaaagaggtggatattctggctatggtggagagcttgctggtttgtaattacgcctatccttttgattgcaatatttatctggtcattggtgcaatttcatagacctaattatggcgcaattccataccctgactggggagttgctttaggctggtgtatgattgttttctgcattatttggataccaattatggctatcataaaaataattcaggctaaaggaaacatctttcaacgccttataagttgctgcagaccagcttctaactggggtccatacctggaacaacatcgtggggaaagatataaagacatggtagatcctaaaaaagaggctgaccatgaaatacctactgttagtggcagcagaaaaccggaatgagatctcattgaaaaaaatatatgattgtataatgtgattttttttagaatagggggaaccttatttatttgtgtgttaactgaataggaaaatgtacatactatgttcatgatagtgtgatttttttcacatttaagcaggaatgcaatataaaaatgtgaatctcttaattctcagccatgtgcttattatatttctttttagattgtctatctgtataacacacacacacacacctaagagtctctatttcacaattatatttttgtaaatagtatatgcatttttaatacattggaggctttattttgaactaatttcttagagaatagttatattttctattacacaagtttaaaaatattattaacttgtattttcttaatatacaatctatcttttccacaaatatgagtgggaaataaatcagcacatttgaaagaaagtgttaaaactgaaggcctcacttaattagaaacgtgataaatatatggacaaatggactatacatactataagaggactgtagtttaatactttttacccaaatatgtttaaaaacatcgtgcatttgttacagctcatgttttctatatgaacttagtcattaatgttctttataaaaagtgaaataagatggaaaaattaggatcctacagccagtacgtgataaatctagaaaattgagttttgagtacctcttttcccatatacaatcttccttccttaggtaatttggaagaaaactatgacccatttaatttctattgtgtttcaccaaattcagtgttgttcattatacctctctgaaatataggtttaatttcaaatagaatatggacttaaatgttaatgagaaactggctttaatcaattctagcattttattactgtaatacagggctgatagagtgattttgtcttatatgagtcagttactacttacaggtgataacttgcatactattggaagataaagttgtcaaacttgtcaagaatgagaaaagccaaattagaaaatcctatgtcctagtttccttaccaaggataattaaatatatcactaagagctttatatattgattatatattgttgacaactggtttaagcatcatagcctatgatgataaacactgcctatatatgtaaatagcttttcatcaattcttaaatttcttaacctaggcttcagggagcatatgaaaccaaaattatatggaacattttctgtgtgtacatgtacatgcatttttctagggagagagtccgtaggtttatcagaatatcaaggaaaactgtgacccaaagaagtttaagaatcacatacagtgctgctggctttttgtgcttggcaaatgagtgacaatagaagaaataatttttcttacacattttaaaacgttttctcttccttgtgattgaagatgaaaggagtaagaaattaaggcatttgtttaatttatactggtaacttatttaggggggaggggacatgaaggtaggtaaataggtaggcctctaattgaaccacctctctaagttatgtacgtatatataagctgaaattgtgtttgacattctgagggttttctttttctttttcctttttttttttttttggtggggggctgggggtcagagtcttgttctgttgcctgggctggagtgcagtggcatgatctcagctcactgcaacctctgccttctggattcaagtgattctcctgcctcagcctcttgagtagctgggactacaggtgcccgccaccacaccagctaatttttgtatttttagtagaggcgaagtttccccatgttggccaggctggtcttgaactcccgacctcaagtgatctgtctacctcggcctcctaaagtgctgagattacaggtgtgagccaccgtgcccggcccattctaagggttttctttgaagacaggtcaaatgctgttagtaagtttcaggagattgttaattcctcagttataccagattttataaaatatttgagaatagatggctaacaagaggttagaaatacttttccttaattttaatccacagtatgttacatgcattctaccactacattttggtgctatttaaggtgtgcaattttctataggtgacttttgcaattcagggaagatttgggcatattaaatgaaagaatatctaattgggggaggtgtgaagggaaagaaattcttttcaaaagctgaccacaaagagtagttaaaagtttttgtcactatcttcacaagtgtgtaaagcacagatttcaacagagtgcttggcatattgtagggtgctcaatggtggtttttattattattactcagattccacagtggcaagaaacatcattctacataatggaaaacatttacatcaaatcccacttactttaatgcgaacttggagataatttatggtattgtattgtaaaccattaatgaaaactttttcacagttgagtgaaattaaaatcactatatctc

SEQ ID NO: 552 - DNA, 2775 bp, Homo sapiens
acagccagcgccgccgggtgcctcgagggcgcgaggccagcccgcctgcccagcccgggaccagcctccccgcgcagcctggcaggtctcctggaggcaaggcgaccttgcttgccctctcttgcagaataacaaggggcttagccacaggagttgctggcaagtggaaagaagaacaaatgagtcaatcccgacgtgtcaatcccgacgatagagagctcggaggtgatccacaaatccaagcacccagagatcaattgggatccttggcagatggacatcagtgtcatttactaaccagcaggatggagacgacgcccttgaattctcagaagcagctatcagcgtgtgaagatggagaagattgtcaggaaaacggagttctacagaaggttgttcccaccccaggggacaaagtggagtccgggcaaatatccaatgggtactcagcagttccaagtcctggtgcgggagatgacacacggcactctatcccagcgaccaccaccaccctagtggctgagcttcatcaaggggaacgggagacctggggcaagaaggtggatttccttctctcagtgattggctatgctgtggacctgggcaatgtctggcgcttcccctacatatgttaccagaatggagggggggcattcctcctcccctacaccatcatggccatttttgggggaatcccgctcttttacatggagctcgcactgggacagtaccaccgaaatggatgcatttcaatatggaggaaaatctgcccgattttcaaagggattggttatgccatctgcatcattgccttttacattgcttcctactacaacaccatcatggcctgggcgctatactacctcatctcctccttcacggaccagctgccctggaccagctgcaagaactcctggaacactggcaactgcaccaattacttctccgaggacaacatcacctggaccctccattccacgtcccctgctgaagaattttacacgcgccacgtcctgcagatccaccggtctaaggggctccaggacctggggggcatcagctggcagctggccctctgcatcatgctgatcttcactgttatctacttcagcatctggaaaggcgtcaagacctctggcaaggtggtgtgggtgacagccaccttcccttatatcatcctttctgtcctgctggtgaggggtgccaccctccctggagcctggaggggtgttctcttctacttgaaacccaattggcagaaactcctggagacaggggtgtggatagatgcagccgctcagatcttcttctctcttggtccgggctttggggtcctgctggcttttgctagctacaacaagttcaacaacaactgctaccaagatgccctggtgaccagcgtggtgaactgcatgacgagcttcgtttcgggatttgtcatcttcacagtgctcggttacatggctgagatgaggaatgaagatgtgtctgaggtggccaaagacgcaggtcccagcctcctcttcatcacgtatgcagaagcgatagccaacatgccagcgtccactttctttgccatcatcttctttctgatgttaatcacgctgggcttggacagcacgtttgcaggcttggagggggtgatcacggctgtgctggatgagttcccacacgtctgggccaagcgccgggagcggttcgtgctcgccgtggtcatcacctgcttctttggatccctggtcaccctgacttttggaggggcctacgtggtgaagctgctggaggagtatgccacggggcccgcagtgctcactgtcgcgctgatcgaagcagtcgctgtgtcttggttctatggcatcactcagttctgcagggacgtgaaggaaatgctcggcttcagcccggggtggttctggaggatctgctgggtggccatcagccctctgtttctcctgttcatcatttgcagttttctgatgagcccgccacaactacgacttttccaatataattatccttactggagtatcatcttgggttactgcataggaacctcatctttcatttgcatccccacatatatagcttatcggttgatcatcactccagggacatttaaagagcgtattattaaaagtattaccccagaaacaccaacagaaattccttgtggggacatccgcttgaatgctgtgtaacacactcaccgagaggaaaaaggcttctccacaacctcctcctccagttctgatgaggcacgcctgccttctcccctccaagtgaatgagtttccagctaagcctgatgatggaagggccttctccacagggacacagtctggtgcccagactcaaggcctccagccacttatttccatggattcccctggacatattcccatggtagactgtgacacagctgagctggcctattttggacgtgtgaggatgtggatggaggtgatgaaaaccaccctatcatcagttaggattaggtttagaatcaagtctgtgaaagtctcctgtatcatttcttggtatgatcattggtatctgatatctgtttgcttctaaaggtttcactgttcatgaatacgtaaactgcgtaggagagaacagggatgctatctcgctagccatatattttctgagtagcatatataattttattgctggaatctactagaaccttctaatccatgtgctgctgtggcatcaggaaaggaagatgtaagaagctaaaatgaaaaatagtgtgtccatgcaaaaaaaaaaa

SEQ ID NO: 553 - DNA, 2947 bp, Homo sapiens
ctcccgccacctccgccaccatgctgctcccccagctctgctggctgccgctgctcgctgggctgctcccgccggtgcccgctcagaagttctcggcgctcacgtttttgagagtggatcaagataaagacaaggattgtagcttggactgtgcgggttcgccccagaaacctctctgcgcatctgacggaaggaccttcctttcccgttgtgaatttcaacgtgccaagtgcaaagatccccagctagagattgcatatcgaggaaactgcaaagacgtgtccaggtgtgtggccgaaaggaagtatacccaggagcaagcccggaaggagtttcagcaagtgttcattcctgagtgcaatgacgacggcacctacagtcaggtccagtgtcacagctacacgggatactgctggtgcgtcacgcccaacgggaggcccatcagcggcactgccgtggcccacaagacgccccggtgcccgggttccgtaaatgaaaagttaccccaacgcgaaggcacaggaaaaacagtctccttgcaaatcttttccgttctgaattcagatgatgccgcagctccagcgttggagactcagcctcaaggagatgaagaagatattgcatcacgttaccctaccctttggactgaacaggttaaaagtcggcagaacaaaaccaataagaattcagtgtcatcctgtgaccaagagcaccagtctgccctggaggaagccaagcagcccaagaacgacaatgtggtgatccctgagtgtgcgcacggcggcctctacaagccagtgcagtgccacccctccacggggtactgctggtgcgtcctggtggacacggggcgccccattcccggcacatccacaaggtacgagcagccgaaatgtgacaacacggccagggcccacccagccaaagcccgggacctgtacaagggccgccagctacaaggttgtccgggtgccaaaaagcatgagtttctgaccagcgttctggacgcgctgtccacggacatggtccacgccgcctccgacccctcctcctcgtcaggcaggctctcagaacccgaccccagccataccctagaggagcgggtggtgcactggtacttcaaactactggataaaaactccagcggagacatcggcaaaaaggaaatcaaacccttcaagaggttccttcgcaaaaaatcaaagcccaaaaaatgtgtgaagaagtttgttgaatactgtgacgtgaataatgacaaatccatctccgtacaagaactgatgggctgcctgggcgtggcgaaagaggacggcaaagcggacaccaagaaacgccacacccccagaggtcatgctgaaagtacgtctaatagacagccaaggaaacaaggataaatggctcataccccgaaggcagttcctagacacatgggaaatttccctcaccaaagagcaattaagaaaacaaaaacagaaacacatagtatttgcactttgtactttaaatgtaaattcactttgtagaaatgagctatttaaacagactgttttaatctgtgaaaatggagagctggcttcagaaaattaatcacatacaatgtatgtgtcctcttttgaccttggaaatctgtatgtggtggagaagtatttgaatgcatttaggcttaatttcttcgccttccacatgttaacagtagagctctatgcactccggctgcaatcgtatggctttctctaacccctgcagtcacttccagatgcctgtgcttacagcattgtggaatcatgttggaagctccacatgtccatggaagtttgtgatgtacggccgaccctacaggcagttaacatgcatgggctggtttgtttcttgggattttcttttagtttgtcttgttttgctttccagagatcttgctcatacaatgaatcacgcaaccactaaagctatccagttaagtgcaggtagttcccctggaggaaataatattttcaaactgtcgttggtgtgatactttggctcaaaggatctttgcttttccattttaagcttctgttttgagttttgccctggggcttgaatgagtcccagagagtcgttccgatggtgggaggctgcctaggaggcagtaaatccagtcacagtgcctgggaggggcccatccttccaaaatgtaaatccagtcgcggtgtgaccgagctggctaacaggcttgtctgcctggttttcctcctacacatggacattattctcctgatcctcctacctggtccaccccagggctaccggaaggtaaaatcttcacctgaaccaattatgagcagtctccttactgaaggtacagccggatacgtggtgcccccggggctggtgttggcagccggggggaggtgcctgagggtccccacggttcctttctgcttttctgaatgcatcaagggtacgagaacttgccaatgggaaattcatccgagtggcactggcagagaaggataggagtggaatgcccacacagtgaccaacagaactggtctgcgtgcataaccagctgccaccctcaggcctgggccccagagctcagggcacccagtgtcttaaggaaccatttggaggacagtctgagagcaggaacttcaagctgtgattctatctcggctcagacttttggttggaaaaagatcttcatggccccaaatcccctgagacatgccttgtagaatgattttgtgatgttgtgatgcttgtggagcatcgcgtaaggcttcttgcttatttaaactgtgcaaggtaaaaatcaagcctttggagccacagaaccagctcaagtacatgccaatgttgtttaagaaacagttatgatcctaaactttttggataatcttttatatttctgacctttgaatttaatcattgttcttagattaaaataaaatatgctattgaaact

SEQ ID NO: 554 - DNA, 3407 bp, Homo sapiens
gcttcccggctctgccctcttggccgaagtgcccgctgccgggcgcgggcctcagacaatacaatggtgggtgaagagaagatgtctctaagaaaccggctgtcaaagtccagggaaaatcctgaggaagatgaagaccagagaaaccctgcaaaggagtccctagagacacctagtaatggtcgaattgacataaaacagttgatagcaaagaagataaagttgacagcagaggcagaggaattgaagccattttttatgaaggaagttggcagtcactttgatgattttgtgaccaatctcattgaaaagtcagcatcattagataatggtgggtgcgctctcacaaccttttctgttcttgaaggagagaaaaacaaccatagagcgaaggatttgagagcacctccagaacaaggaaagatttttattgcaaggcgctctctcttagatgaactgcttgaagtggaccacatcagaacaatatatcacatgtttattgccctcctcattctctttatcctcagcacacttgtagtagattacattgatgaaggaaggctggtgcttgagttcagcctcctgtcttatgcttttggcaaatttcctaccgttgtttggacctggtggatcatgttcctgtctacattttcagttccctattttctgtttcaacattgggccactggctatagcaagagttctcatccgctgatccgttctctcttccatggctttcttttcatgatcttccagattggagttctaggttttggaccaacatatgttgtgttagcatatacactgccaccagcttcccggttcatcattatattcgagcagattcgttttgtaatgaaggcccactcatttgtcagagagaacgtgcctcgggtactaaattcagctaaggagaaatcaagcactgttccaatacctacagtcaaccagtatttgtacttcttatttgctcctacccttatctaccgtgacagctatcccaggaatcccactgtaagatggggttatgtcgctatgaagtttgcacaggtctttggttgctttttctatgtgtactacatctttgaaaggctttgtgcccccttgtttcggaatatcaaacaggagcccttcagcgctcgtgttctggtcctatgtgtatttaactccatcttgccaggtgtgctgattctcttccttactttttttgcctttttgcactgctggctcaatgcctttgctgagatgttacgctttggtgacaggatgttctataaggattggtggaactccacgtcatactccaactattatagaacctggaatgtggtggtccatgactggctatattactatgcttacaaggactttctctggtttttctccaagagattcaaatctgctgccatgttagctgtctttgctgtatctgctgtagtacacgaatatgccttggctgtttgcttgagctttttctatcccgtgctcttcgtgctcttcatgttctttggaatggctttcaacttcattgtcaatgatagtcggaaaaagccgatttggaatgttctgatgtggacttctcttttcttgggcaatggagtcttactctgcttttattctcaagaatggtatgcacgtcagcactgtcctctgaaaaatcccacatttttggattatgtccggccacgttcctggacttgtcgttacgtgttttagaagcttggactttgtttcctccttgtcactgaagattgggtagctccctgatttggagccagctgtttccagttgttactgaagttatctgtgttatttggaccactccaggctttacagatgactcactccattcctaggtcacttgaagccaaactgttggaagttcactggagtcttgtacacttaagcagagcagaagtttttttgtggggctgggtggggggagaagaccgactaacagctgaagtaatgacagattgttgctgggtcatatcagctttatcccttggtaattatatctgttttgtttcttgactctgtccaatcagagaataaacatcatagtttcttggccactgaattagccaaaacacttaggaagaaatcacttaaatacctctggcttagaaattttttcatgcacactgttggaatgtatgctaattgaacatgcaattggggaagaaaaaatgtagaatgatttttgctatttctagtagaaagaaaatgtctgttttccaaagataatgttatacatcctattttgtaatttttttgaaaaaagttcaatgttcagttttccttagtttttaccttgttttctctataggtcatgatttctgtgaagcaaaaagatgccttttaccatgaattcttgagtttacatcaataatattgtatattaaggggatcagaagtaggaaggaaaaaataagagatagcagaggaaaaagaaaaacatttcctcttataacttctgaagtaatttgtaaaaaagatttgtagagtcaatcatgtgtttaaattattttatcacaaacttaacatggaagatattcctttttaactttgtggtaacttctttgaagttatttagaaatatcctttggaacaattattttattgtctaataaatattgacttctcttgaattattttgcagactagtgagtctgtaacataagtattaatcacctccactcatattaaagtgatcattaagaatccagaagctggcttctgcatttgctcagttatacttttaatggtagtatgtttttaggtggaataaattaatatgtgattggtttcaaggaaatgtactctattatgtaatacttccattttataagatgcccgtttctaatacaatgtgtgtaggaattatttgtatgtatgaggtatgattgtaaagattgagcattggaaggggtatcagagaccatgtagttcaactttccactcaaagtaagatttatgaattatttaaatgatagttgttacttggaacagccacttgagaggctctcttggtattgtttggaattgttttaaagtcagtttgagtctcacaagaaggtaagtagagtttcttaatagtcacaacttaatttgaaccacaagtatccagcttaatcacgtatcttactcacgataccactggtccagatgagtttaggtaattttcaaacattaaatccaacttcaacggaaacaaatacactcaagggaagttatttttaaaaaggtactctgcatgttcccgcagtaatgttctgcacaacagtattgtaattgtaatggaatcataacctgctaactagtttgctttaatatggcttgtaattcttgacatttttcttaaaattaaaacgaatttttattttgaatttaaaaaaaaaaaaaaa

SEQ ID NO: 555 - DNA, 1813 bp, Homo sapiens
agcgaccgacgagcaaccgtctgaggccaggagcgctgcgacggagccttgaccgccgttgcccggccctctcccgcgcagccccgggcttccgcagtccttccttcagaagggaaatttctgagggtcaggaaggggaatctgtacctcactccttgaacaccaaggaaggaatattgggaaaccaaaatgaggcacaatcagatgtgttgtgagacaccacctactgtcactgtttatgtaaaatcagggtcaaatagatcacatcagcctaaaaagcccattactctgaagcgtcctatttgtaaagataattggcaagcatttgaaaaaaatacacataataacaacaaatctaaacgccccaaaggaccttgtctggttatacagcgtcaggatatgactgctttctttaaattatttgatgacgatttaattcaagatttcttgtggatggactgctgctgtaaaattgcagacaagtatcttttggctatgacctttgtttatttcaagagggctaaatttactataagtgagcataccaggataaatttctttattgctctgtatctggctaatacagttgaagaagatgaagaagaaaccaagtacgaaatttttccatgggctttagggaaaaactggagaaaattgttccctaatttcttaaagttaagggaccagctctgggatagaattgactatagggctattgtaagcaggcgatgttgtgaggaggttatggccattgcaccaacccattatatctggcaaagagaacgttctgttcatcacagtggagctgtcagaaactacaacagagatgaagttcagctgccccggggacctagtgccacaccagtagattgttcactctgtggtaaaaaaagaagatatgttagactgggattgtcttcatcatcatctttatccagtcatacagcaggggtgacagaaaaacattctcaggactcatacaactcactgtcaatggacataataggtgatccttctcaagcttatactggttctgaagtagtcaatgaccatcaatcaaataaaggaaagaaaactaatttcttgaagaaagacaaatctatggagtggtttacaggaagtgaagaatgagatggcccaactaaaccaatttggaatcattaactacaaaatgtcaaactaactgcaagacaagtgtcaaaatgggatgtttaagcagttttgctatgttatacatcttttagttgttattttcaaaattatatgtataagttatataagtcatagtaatagctaaaaatgccaatctatggaagcagtgattttcaatataaagttctattttgatatttttccatcttcaagtcagttactgtcatctggagtactcagttaagttgtggtttgaccttcctcaacttgacaagaaaagctaatttaagagaagaaaaacataaagtcattatattaattaaaagaaaaaacaccatttaatatgttctgaaaacattactcacctgtatgaccaggttgccagtgtactggtctagcaacatagggaaatgatccatatggaaaatcagaatgcgattcttctgttgtaaaaaaatatatgtactataagctacataaaatattttctatttttttcacaaaactgttaaaatatgagttactctctttattgtaagttttttctttatttatttccttgcatatgttttagagctactctgccagttattatacagaaactatttgtcaatgattatgtaataaacatatgattttataaccaaaaaaaaaaaaaaaa

SEQ ID NO: 556 - DNA, 4838 bp, Homo sapiens
agtgtaagggagtgggagctggtccgtgccgcggcggccgcgcagggagctctcgaggcaacgccggggcgcccgaggtctggaaggcgcagaaatggagcaagagccacaaaatggagaacctgctgaaattaagatcatcagagaagcatataagaaggcctttttatttgttaacaaaggtctgaatacagatgaattaggtcagaaggaagaagcaaagaactactataagcaaggaataggacacctgctcagagggatcagcatttcatcaaaagagtctgaacacacaggtcctgggtgggaatctgctagacagatgcaacagaaaatgaaagaaactctacagaatgtacgcaccaggctggaaattctagagaagggtcttgccacttctctgcagaatgatcttcaggaggtgcccaagttatatccagaatttccacctaaagacatgtgtgaaaaattaccagagcctcagtcttttagttcagctcctcagcatgctgaagtaaatggaaacacctcaactccaagtgcaggggcagttgctgcacctgcttctctgtctttaccatcacaaagttgtccagcagaagctcctcctgcttatactcctcaagctgctgaaggtcactacactgtatcctatggaacagattctggggagttttcatcagttggagaggagttttataggaatcattctcagccaccgcctcttgagaccttagggctggatgcagatgaattgattttgataccaaatggagtacagattttttttgtaaatcctgcaggggaggttagtgcaccttcgtatcctgggtaccttcgaattgtgaggtttttggataattctctcgatacggttctaaaccgtcctcccgggtttcttcaggtttgtgactggttatatcctctagttcctgatagatctccggttctgaaatgtactgcgggagcctacatgtttcctgatacaatgctacaagcagcaggatgctttgtgggggtcgtcctgtcctctgagttaccagaggatgatagagagctctttgaggatctgttaaggcaaatgtctgaccttcggctccaggccaactggaacagagcagaagaagaaaatgaattccaaatccctggaagaactagaccctcctctgaccaactaaaagaagcctctggcactgatgtgaaacagttggaccaaggcaataaggatgtacgtcataaaggaaaacgtggaaaaagggctaaagatacttcaagtgaagaagttaacctgagtcacattgtaccatgtgagccagttccagaagaaaagccaaaagaattacctgaatggagtgaaaaagtggctcacaacattttgtcaggtgcttcctgggtgagttggggtttagtcaaaggtgctgagattactggtaaggcaatccagaaaggtgcttctaaactccgagagcggattcaaccagaagaaaaacccgtggaagttagtccagctgtcaccaagggactttatatagcgaagcaagctacaggaggagcagcaaaagtcagtcagttcctggttgatggagtttgcactgtagcaaattgcgttggaaaagaactagctccacatgtcaagaagcatggaagcaaacttgttccagaatctcttaaaaaagacaaagatgggaaatctcctctggatggtgctatggttgtagcagcaagtagtgttcaaggattttcaactgtctggcaaggattggaatgtgcagctaaatgcatcgttaacaatgtttcagcagaaactgtacaaactgtcagatacaaatacggatataatgcaggagaagctacccaccatgcggtggattctgcggtcaatgttggcgtaactgcctacaatattaacaacattggtatcaaagcaatggtgaagaaaactgcaacacaaacaggacacactctccttgaggactatcagatagttgataattctcagagggaaaatcaagaaggagcagcaaatgtcaacgtgagaggggagaaggatgagcagacgaaggaagtaaaggaggcaaagaagaaagataaatgatgaagtgctgggaatcacttataccaaagccttatgaaatggatgaaattttgttaaataggcaaatgtggaattcctcacagattaaccagtattttttaaatgtattcattcctacaaattaactttcataaattttatggcatgtcttctatttaaaaggaaaagaataagtattcttgcatctggccttagaaatgtgaagttatattctcaagtttatttttttccaagtgtagctaaaatatttttgcaggtaaaataaagctgatagtacatgtgttgttcaaaccttgttaaacctaatattgaactatttttatatctgctgtctttcagaaggcaaataggaaactatatatttgcttaaaaattggcatttagtaaccttaattctttttatagaaggaatgacttaaagtattgtcccctctttttgcactaattgtggatttttttagatgcttctcaaaattttcagtgtgtaagctaaacaaaaactaaaactaagaattctcaaaaaaacttgttcaaaacagggaaagactgatgaaaagtaaaatggactacttttgtaacttacctgtttgttaggaaatggaatggtctctttgatttaaaataaataaaaatagattattacgtcttttgtattgagactgtattgttatgagcctaggaaatttgggaacatgattgtattgtattaaaattcgaagtgattattatcagcttaattggattaaaaaagtacttcaagaaattattttatcatatctgcttctgtttttccaaaaggttaaaacttgtaaaaaaaatatatataaacaattgagtttactaatggtaaacatttttattctgggattcggtcattggaatttatattaaaagacaagttattaaaaaggaaaggttctattcataatcagggtaaagaatatgaaaaccttagacgtaatccatggtggataggcattatggtttccactttggcagaaggcagactattcacagccctatttacttacataggctaaaaaactatgtaactaaatacctaatggtatttaatttttgtttattgaatttaagagattggtattagttttcatagctgtagtccattctaataatttctgatcttctagtggctacttaattagacattatttgaagctgtctgaagaatgcactttatgaattaaaaaactgaattgcctgacctcgttatcacatgagcttatattttgggaacacatagaactgatggaggcttttcctaaggccaaggataatgtactagttgttaaaatggaaataaaagtgaagtggtaaatagcttacagacagtctatgctttgtttaagaaatggaatggcacttcatatattctcatttgtgggagctaaaaattacaataatcaaacttaaggagatagagagtagaatgatggttaccagaggctgggaggcattgaagggatggggagggaagtgaggttgattaatgggtacgaaaatatagttagaacgaatttgttgtagtatttgatagcccaacagggtgactacagtcaacaataactttatacatttaaaaataaaagagtgtaattgggacgtttgtaacacaaatgaatgcttgaagcagtagatacaccctgatgtaattattataaatcgcatacctgtatcaaaatatctcatgtatcccataaatatatacacctaccatgtacccataaaaatttaaaaagaaatggaatggcaaataatggaacataaactttaaacagttagctttgaccagaggtcagcaaatatcctccatgggctaaatccagatgtccacctgttttcataaataacgttttattggagcatagctgtacccatttgtttacatattggctatggctgctgtctagttcaacgtgagagttgaatagttgcatcagagagtatatggtccacaagcctaacttattcactctctggccctttgcagaaaaagtgtgctgccttagtctatagaaaatggacttttcccaccattcactgactcattaggagataggcatcttctaaagattttttttatattgtgtaatgattgatatatagataaaattatatattacttgtaaggtatgatgaataacaacacttaaaaactcatcacacctaaagacatggaaagctgccaattacctatatgtatgttcttcctattttcttacctctttccccatgtcattttttattgttccttgccattttttaatcacacatgtatgttctccaaacatactgtttcattttttgaagctttctacatatagtgtctgaatgtgaagtcttactcaacttgcttttttgagtttatgtttaaaattcattcttgcgcttatatgcatggatggtttacttgctctatagtattctgtgtgagtataccacaatttaagtgttcattttcctatcagttgacatttgtttttagtttttgttggtagaaacagtacactcaaaacatccttgactgtcccctggtacacatatgcaagagactttatgcgtaagagtggagttgttggcttgtcaagttttgcaaaataatgccaggtattttccaaaatgatgatattctcttgagtattacttccctttgcaatgtttttattgttaatgtagcatatataaaaaagtatctcataattttaaaaaaaaaaaaaaaaaa

SEQ ID NO: 557 - DNA, 386 bp, Homo sapiens
ccaggatcagcatggccgtccgccagtgggtaatcgccctggccttggctgccctccttgttgtggacagggaagtgccagtggcagcaggaaagctccctttctcaagaatgcccatctgtgaacacatggtagagtctccaacctgttcccagatgtccaacctggtctgcggcactgatgggctcacatatacgaatgaatgccagctctgcttggcccggataaaaaccaaacaggacatccagatcatgaaagatggcaaatgctgatcccacaggagcacctcaagccatgaagtgtcagctggagaacagtggtgggcatggagaggatatgacatgaaataaaagatccagcccaactgaaaaaaaaaaaaaaaaaaa

SEQ ID NO: 558 - DNA, 3249 bp, Homo sapiens
cgcggctgcatggacgcgggtccggcgcgcgggaggcgatgacggccccgccatggcccgggcgggcagctgcggcggcgccgcggcgggcgcagggcggccggagccctgggagctgtccctggaggaggtgctgaaggcctacgagcagccgctcaacgaggagcaggcgtgggccgtgtgcttccagggctgccgcgggctgcggggctcgccgggccggcgcctgcgggataccggggacctcctgctgcgcggggacggctcggtcggggcgcgggagcccgaggccgcggaacctgcaaccatggtcgtgccactagccagctcggaagcccagaccgtgcagtccctcggcttcgccatctaccgcgcgctggactgggggctggacgagagcgaggagcgcgaactcagccctcagctggagcggctcatcgacctcatggccaacaacgacagcgaggacagcggctgcggtgccgccgatgagggctacgggggtcccgaggaggaggaggaggccgagggcgtcccccgcagcgtgcgcacctttgcccaggccatgcggctgtgcgcggcgcggctgaccgacccccggggcgcacaggcgcattaccaggccgtgtgccgcgcgctcttcgtggagacgctggagctgcgggccttcctggccagggtccgggaggccaaggagatgctgcagaagcttcgggaggacgagccgcatctggagacgcctcgggcagagctggacagcctgggtcacacagactgggcccgactgtgggttcagctcatgcgggagctccgccgcggagtgaagctgaagaaggtgcaagagcaggagttcaaccccctccccaccgagttccagctcacgcccttcgagatgctgatgcaggacatccgggcccggaactacaagctgcgcaaggtcatggtggatggggacatcccgccccgggtgaagaaggacgctcacgagctcatcctggactttatccgctcacggcctccactgaagcaggtctctgagaggcggctgcgcccgttgccaccaaagcaaaggtccctgcatgagaagatcctggaggagatcaagcaggagcggaggctgcgcccggtgcggggcgagggctgggctgcccgcgggtttggctctctgccctgcatcctcaacgcctgctccggagatgccaagtccacctcctgcatcaacctgtcagtcacagatgctgggggcagcgcccagcgcccgcggccccgcgtgctgctcaaggcgcctaccttggctgaaatggaagagatgaatacatctgaggaagaagagtctccgtgtggggaggtgacgctgaaacgggaccgctccttctcagagcatgacctggcccagctccgaagtgaggtggcctctggcctgcagtcggccacccaccccccaggagggacggagccaccacggccccgagctggcagtgcgcatgtgtggaggcccggctcccgagaccagggtacctgtcccgcgagtgtctctgaccccagccaccccctactcagcaaccggggctcctcgggggacagacccgaggcctccatgacccccgatgccaaacacctgtggctggagttcagccaccccgtggagagcctggcgctgactgtggaagaggtgatggacgtgcgccgtgtgctggtgaaggccgagatggaaaagtttttgcagaacaaggagctcttcagcagtctgaagaaggggaagatttgctgctgctgccgggccaagttcccgctgttctcgtggccgcccagctgtctcttctgcaagagagccgtctgcacttcctgtagcataaagatgaagatgccttctaagaaatttggacacatccctgtctacacactgggctttgagagtcctcagagggtatcagctgccaaaaccgcgccaatccagagaagagacatctttcagtctctgcaagggccacagtggcagagcgtggaggaggcgttcccccacatctactcccacggctgtgtcctgaaggatgtctgcagtgagtgcaccagctttgtggcagacgtggtgcgttccagccgcaagagcgtggacgtcctcaacactacgccacgacgcagtcgccagacccaatccctctacatccctaacaccaggactcttgacttcaagtgacagccccaggtggccaggcctccaggaggcaccaggcaggccctgtatcaggctaggacgctctgagctgtgcatgtacatatatacatatatagatacatttataatatatacacacagtctatatatttatatacactgtttcctggccccagagctcatttgggttcaggcgcacttcaaaaccctccctgggggaggctgtttcttctcaggattccttgccagggaggaaggggagggaacagggtgggttttctcactgaagagagaaagcagaaggttctagatcctggcacagactgcatcccatgttcccatgctcttctccgtccccaggaatgcgaacggcagtttcccttccccagtggacgtctaggtggggacagggtatcttggctcccagctggaccagagtgccctgcttgcctctgctctccctttgtggggactcaggcagcagaggcatctgggaagtctctgagtaggcagggtcctcctgggaggcacccccacctgtttgaaaggtctggccaggcgtggtggttcaggcctgtaattccagcactttgggaggccgaggagggaggatcacctgaggtcaggagtttgagaccagcctggccaacatgatgaaatgttgtctctactgaaaatgcaaaaattagccaggtatagtggcaggaacctgtaatcccagctacaggggaggctgaggcaggagaatcgcttgaacccgggaggtgtaggttgcagtgagccgagattgcaccactgcactccagcctgggcgacagagcgagactctgtctcgaaaaaaaaaaaggtccgtgccaagctgctccctgcccttgccctttccctttccctggggtccaaaccacatgtgtcctgcctctcctggccctaccacattctggtgctgtcctcactcgcccctggcccagaggctcctgaagatgctgggcggtcctggcacagggaggagcagctctgtaaatctgtgcacatggccactcttggcctaataaaggaggtctcacagtcaaaaa

SEQ ID NO: 559 - DNA, 2397 bp, Homo sapiens
cacgcgcccctcctccgcatctgagcgggggagcggcggcccccagctgaatgggcgcgagagcggcgctgggggcgggtgggggcgcggggtaccgggctggcggccggccggcgccccctcattagtatgcggacgaaggcggcgggctgcgcggagcggcgtcccctgcagccgcggaccgaggcagcggcggcacctgccggccgagcaatgccaagtgagtacacctatgtgaaactgagaagtgattgctcgaggccttccctgcaatggtacacccgagctcaaagcaagatgagaaggcccagcttgttattaaaagacatcctcaaatgtacattgcttgtgtttggagtgtggatcctttatatcctcaagttaaattatactactgaagaatgtgacatgaaaaaaatgcattatgtggaccctgaccatgtaaagagagctcagaaatatgctcagcaagtcttgcagaaggaatgtcgtcccaagtttgccaagacatcaatggcgctgttatttgagcacaggtatagcgtggacttactcccttttgtgcagaaggcccccaaagacagtgaagctgagtccaagtacgatcctccttttgggttccggaagttctccagtaaagtccagaccctcttggaactcttgccagagcacgacctccctgaacacttgaaagccaagacctgtcggcgctgtgtggttattggaagcggaggaatactgcacggattagaactgggccacaccctgaaccagttcgatgttgtgataaggttaaacagtgcaccagttgagggatattcagaacatgttggaaataaaactactataaggatgacttatccagagggcgcaccactgtctgaccttgaatattattccaatgacttatttgttgctgttttatttaagagtgttgatttcaactggcttcaagcaatggtaaaaaaggaaaccctgccattctgggtacgactcttcttttggaagcaggtggcagaaaaaatcccactgcagccaaaacatttcaggattttgaatccagttatcatcaaagagactgcctttgacatccttcagtactcagagcctcagtcaaggttctggggccgagataagaacgtccccacaatcggtgtcattgccgttgtcttagccacacatctgtgcgatgaagtcagtttggcgggttttggatatgacctcaatcaacccagaacacctttgcactacttcgacagtcaatgcatggctgctatgaactttcagaccatgcataatgtgacaacggaaaccaagttcctcttaaagctggtcaaagagggagtggtgaaagatctcagtggaggcattgatcgtgaattttgaacacagaaaacctcagttgaaaatgcaactctaactctgagagctgtttttgacagccttcttgatgtatttctccatcctgcagatactttgaagtgcagctcatgtttttaacttttaatttaaaaacacaaaaaaaattttagctcttcccactttttttttcctatttatttgaggtcagtgtttgtttttgcacaccattttgtaaatgaaacttaagaattgaattggaaagacttctcaaagagaattgtatgtaacgatgttgtattgatttttaagaaagtaatttaatttgtaaaacttctgctcgtttacactgcacattgaatacaggtaactaattggaaggagaggggaggtcactcttttgatggtggccctgaacctcattctggttccctgctgcgctgcttggtgtgacccacggaggatccactcccaggatgacgtgctccgtagctctgctgctgatactgggtctgcgatgcagcggcgtgaggcctgggctggttggagaaggtcacaacccttctctgttggtctgccttctgctgaaagactcgagaaccaaccagggaagctgtcctggaggtccctggtcggagagggacatagaatctgtgacctctgacaactgtgaagccaccctgggctacagaaaccacagtcttcccagcaattattacaattcttgaattccttggggattttttactgccctttcaaagcacttaagtgttagatctaacgtgttccagtgtctgtctgaggtgacttaaaaaatcagaacaaaacttctattatccagagtcatgggagagtacaccctttccaggaataatgttttgggaaacactgaaatgaaatcttcccagtattataaattgtgtatttaaaaaaaagaaacttttctgaatgcctacctggcggtgtataccaggcagtgtgccagtttaaaaagatgaaaaagaataaaaacttttgaggaacaaaaaaaaaaaaaaa

SEQ ID NO: 560 - DNA, 2262 bp, Homo sapiens
ctggggagtaatagcatgggcaaccattatcctgtctcgccgccacccaggacatggcttctgttccaatgccaagtgagtacacctatgtgaaactgagaagtgattgctcgaggccttccctgcaatggtacacccgagctcaaagcaagatgagaaggcccagcttgttattaaaagacatcctcaaatgtacattgcttgtgtttggagtgtggatcctttatatcctcaagttaaattatactactgaagaatgtgacatgaaaaaaatgcattatgtggaccctgaccatgtaaagagagctcagaaatatgctcagcaagtcttgcagaaggaatgtcgtcccaagtttgccaagacatcaatggcgctgttatttgagcacaggtatagcgtggacttactcccttttgtgcagaaggcccccaaagacagtgaagctgagtccaagtacgatcctccttttgggttccggaagttctccagtaaagtccagaccctcttggaactcttgccagagcacgacctccctgaacacttgaaagccaagacctgtcggcgctgtgtggttattggaagcggaggaatactgcacggattagaactgggccacaccctgaaccagttcgatgttgtgataaggttaaacagtgcaccagttgagggatattcagaacatgttggaaataaaactactataaggatgacttatccagagggcgcaccactgtctgaccttgaatattattccaatgacttatttgttgctgttttatttaagagtgttgatttcaactggcttcaagcaatggtaaaaaaggaaaccctgccattctgggtacgactcttcttttggaagcaggtggcagaaaaaatcccactgcagccaaaacatttcaggattttgaatccagttatcatcaaagagactgcctttgacatccttcagtactcagagcctcagtcaaggttctggggccgagataagaacgtccccacaatcggtgtcattgccgttgtcttagccacacatctgtgcgatgaagtcagtttggcgggttttggatatgacctcaatcaacccagaacacctttgcactacttcgacagtcaatgcatggctgctatgaactttcagaccatgcataatgtgacaacggaaaccaagttcctcttaaagctggtcaaagagggagtggtgaaagatctcagtggaggcattgatcgtgaattttgaacacagaaaacctcagttgaaaatgcaactctaactctgagagctgtttttgacagccttcttgatgtatttctccatcctgcagatactttgaagtgcagctcatgtttttaacttttaatttaaaaacacaaaaaaaattttagctcttcccactttttttttcctatttatttgaggtcagtgtttgtttttgcacaccattttgtaaatgaaacttaagaattgaattggaaagacttctcaaagagaattgtatgtaacgatgttgtattgatttttaagaaagtaatttaatttgtaaaacttctgctcgtttacactgcacattgaatacaggtaactaattggaaggagaggggaggtcactcttttgatggtggccctgaacctcattctggttccctgctgcgctgcttggtgtgacccacggaggatccactcccaggatgacgtgctccgtagctctgctgctgatactgggtctgcgatgcagcggcgtgaggcctgggctggttggagaaggtcacaacccttctctgttggtctgccttctgctgaaagactcgagaaccaaccagggaagctgtcctggaggtccctggtcggagagggacatagaatctgtgacctctgacaactgtgaagccaccctgggctacagaaaccacagtcttcccagcaattattacaattcttgaattccttggggattttttactgccctttcaaagcacttaagtgttagatctaacgtgttccagtgtctgtctgaggtgacttaaaaaatcagaacaaaacttctattatccagagtcatgggagagtacaccctttccaggaataatgttttgggaaacactgaaatgaaatcttcccagtattataaattgtgtatttaaaaaaaagaaacttttctgaatgcctacctggcggtgtataccaggcagtgtgccagtttaaaaagatgaaaaagaataaaaacttttgaggaaaaaaaaaaaaaaaaaaaaaaaaaaaa

SEQ ID NO: 561 - DNA, 4001 bp, Homo sapiens
tgccgggaggagtgggggcggtgcctcacgtctggtacagtcatcacaagcctgttcggcgggactgtgatggccagagagatgacgatcttaggatcggctgttttgactctcctgttggccggctatttggcacaacagtatttaccattgcctactcctaaagtgattggtattgatcttggcaccacctattgttctgttggggtgttttttcctggcacaggaaaagtaaaggtgattccagatgaaaatgggcatatcagcatacccagcatggtgtcttttactgacaatgatgtatatgtgggatatgaaagcgtagagctggcagattcaaatcctcaaaacacaatatatgatgccaaaagattcataggcaagatttttaccgcagaagagttggaggctgaaattggcagatacccatttaaggttttaaacaaaaatggaatggttgagttttctgtgacaagtaatgagaccatcacagtgtccccagaatatgttggctctcgactattgttgaagttaaaggaaatggcagaggcatatcttggaatgccagttgccaatgctgtcatttctgtaccagcagaatttgatctaaaacagagaaattcaacaattgaagctgctaaccttgcaggactgaagattttgagggtaataaatgaacccacagcagcagctatggcctatggtctccacaaggctgacgtcttccacgtcttggtgatagacttgggcggaggaactctagatgtgtctttactgaataaacaaggagggatgtttctaacccgagcaatgtctggaaacaataaacttggaggacaggacttcaatcagagattgcttcagtacttatataaacagatctatcaaacatatggcttcgtgccctctaggaaagaggaaatccacagattgagacaagctgtggaaatggtcaaattaaatctgactcttcatcaatctgctcagttgtcagtattactaacggtggaggagcaggacaggaaggaacctcacagtagtgacactgaactgccaaaagacaaactttcctcagcagatgaccatcgcgtgaacagtgggtttggacgtggcctttctgataagaaaagtggagaaagtcaggttttatttgaaacagaaatatcacggaaactctttgatacccttaatgaagacctctttcagaaaatactggtacccattcagcaagtattgaaagaaggccacctggaaaagactgagattgatgaggtggttttagttgggggctccactcgtattcctcggatccgtcaagtcattcaagagttctttggaaaagatcccaacacatctgtagaccctgacctagcagtagtaacgggagtggctatccaagcagggattgatggaggctcttggcctctccaagtcagtgctttagaaattcccaataagcatttacaaaaaaccaacttcaactgaattctgcagaaataatggttatttgtgaacttgtctgatgatctcttcccatttatcagattaccttttccacaaaagaaagtctctaaaatatcacagatttacctagagggcaacatttagatacaggaaaattttacatagtgttttgtcttaggattagacgtgaccagattgatcctgtttgattttggagagatcctattctaacaaatactctaaaatgataaaattgaggtacaactctcttaaaagagtatggataactatattttctggattctggaggttgataaccatatgcacttaacattatattctataaacattaagtagtgccagttatgagattcccagttcttactaaattgtattagcaggagctggtaattacttgtattatcacatgtaactaataatttgaactatacttgaaggaccgtgttgatgtcaggtatttacagtggttggaagatagcagtattattagcataagctgcatacgtaatattcagtaactgccatattatataacaaatttacattcacaaattcagtatcctgttaagtgtcatattcttgtaatctgcattctccaggagttttatgtgtttaatagatgaatttattttatttctaaaggtattcaaatgtttcagcaccatataatagaaatacccaattatattctagttcctttatgtcctgtacatcattctctgcttggatttccattattctgtttggttagagaataaaattggtaattgcatttgaagaatgtgttaatgtcataataaagccatgattgctatcttatttttgttatccgagacctttgcaaacattggcaaatagcatcaattacctactgtatttgtttctttgtttatattttcagtaagccctggggaatatagcatggaattgagctactaaatggttttggttccgttttacggagatttttcctcatatttagttttgaatgaggaaaatgtgctcaattataaaagctgtgttattgttttctattattatttttaaataatcacacttggactcttttcaaacattaggttagtttgtaatgaaagcaaaaaatttgtgaatactggaagtaacgtggaaatctaatgtggaagccattgtggcaaggtttctacaaatcggcatttggagcagagttgtttgtttttgttgtttgtttcctttaagaaaaaccacagggaccaagaaagaaaatataacagtttgatttctgtcatacccattgtatttgaagatatatggatacagattatatatatatatacatattttccttaatagaggaatgcttcatattattcaaaaattatatcctgatcacctttttttgttttttattgtaaagtatctctgctttatccattgctgaattcgataggatgttgaaatgctggtcaccaaaaaaggaaactgagcaaattcatttcaacaacatcaaaacttcagcttctcatagtaaaaagctgaatgttactaatatttttcatatctaaaaaaaaattcttagcaatgaaattgctgttaaaacacaaatttcaatcaaatacttttgtgtatagaaaatatgtatagtaggtagatagaaaagtataaaatgtttgttgaagtatcttattttagaatgaatggagaaatgccaaagatgaatccttcactgcattatgaaaatatttcacatgttctcttggactttatataaatctgtaatagattttagaattgaaaaattctttgtgaaggtcttctaaaagtgttccaatttatctcaaaatctccatatataggatcagcttaaaacataaagaaaaccttgaatttctcaaatgtttgagatgttcaagacagtctcttaatccgttaatgcttttggaaacaattgacaaaatagggcaggcagctcatctcatgtcctgaagttggaatttaaataattcctatttgcaaattagaatgacagtgttggaatttggaggcagtagttgagcatattctctagtatatagctacacctttaataaaatgaaggaatgtcttcaatcatattttagtgggctatttataaatagtcttgaagtcaatttagtttatttatttaaaagataatgcatcctgaaagggatcatttatgaataacaatctgaagtcttttcataaaaaaaattaataaactttagttgtacatttagccagtgttatttgaagtatgtaacttttaaaatattaagtgtcttgtatgattagaatatgtgaatgagtaacttattttgtatcaggaatgttttggtactgtgttttcactcaaaccactgacttaacagatactgctgtgtataacatgtactaaatattacagttattgtgcataacagattgttcctcttatatttgtgtgtatacaggcaattcatgttttaatgtaaataaataccattttgcagtttgttttttaaaaaaaaaaaaaaaaa

SEQ ID NO: 562 - DNA, 5699 bp, Homo sapiens
ggagttctcagacctccagtttcagccctgccctcagcctccaatccgtaagagacacccagccccagcaattggattgggcagcccgtcttgacacaccactgtgctgagtgcttgaggacgtgtttcaacagatggttggggttagtgtgtgtcatcacattcgagtggggattaagagaaggaaggctgccttgctggagctgtgtggtcttctccaagtgagagtcgcaggcaatagaactactttgcttttggaggaaaaggaggaattcattttcagcagacacaagaaaagcagtttttttttcagggattcttcacttctcttgaacaaggaactcactcagagactaacacaaaggaagtaatttcttacctggtcattatttagtctacaataagttcatccttcttcagtgtgaccagtaaattcttcccatactcttgaagagagcataattggaatggagaggtggtgctgacggccacccaccatcatctaaagaagataaacttggcaaatgacatgcaggttcttcaaggcagaataattgcagaaaatcttcaaaggaccctatctgcagatgttctgaatacctctgagaatagagattgattattcaaccaggatacctaattcaagaactccagaaatcaggagacggagacattttgtcagttttgcaacattggaccaaatacaatgaagtattcttgctgtgctctggttttggctgtcctgggcacagaattgctgggaagcctctgttcgactgtcagatccccgaggttcagaggacggatacagcaggaacgaaaaaacatccgacccaacattattcttgtgcctaccgatgatcaagatgtggagctggggtccctgcaagtcatgaacaaaacgagaaagattatggaacatgggggggccaccttcatcaatgcctttgtgactacacccatgtgctgcccgtcacggtcctccatgctcaccgggaagtatgtgcacaatcacaatgtctacaccaacaacgagaactgctcttccccctcgtggcaggccatgcatgagcctcggacttttgctgtatatcttaacaacactggctacagaacagccttttttggaaaatacctcaatgaatataatggcagctacatcccccctgggtggcgagaatggcttggattaatcaagaattctcgcttctataattacactgtttgtcgcaatggcatcaaagaaaagcatggatttgattatgcaaaggactacttcacagacttaatcactaacgagagcattaattacttcaaaatgtctaagagaatgtatccccataggcccgttatgatggtgatcagccacgctgcgccccacggccccgaggactcagccccacagttttctaaactgtaccccaatgcttcccaacacataactcctagttataactatgcaccaaatatggataaacactggattatgcagtacacaggaccaatgctgcccatccacatggaatttacaaacattctacagcgcaaaaggctccagactttgatgtcagtggatgattctgtggagaggctgtataacatgctcgtggagacgggggagctggagaatacttacatcatttacaccgccgaccatggttaccatattgggcagtttggactggtcaaggggaaatccatgccatatgactttgatattcgtgtgcctttttttattcgtggtccaagtgtagaaccaggatcaatagtcccacagatcgttctcaacattgacttggcccccacgatcctggatattgctgggctcgacacacctcctgatgtggacggcaagtctgtcctcaaacttctggacccagaaaagccaggtaacaggtttcgaacaaacaagaaggccaaaatttggcgtgatacattcctagtggaaagaggcaaatttctacgtaagaaggaagaatccagcaagaatatccaacagtcaaatcacttgcccaaatatgaacgggtcaaagaactatgccagcaggccaggtaccagacagcctgtgaacaaccggggcagaagtggcaatgcattgaggatacatctggcaagcttcgaattcacaagtgtaaaggacccagtgacctgctcacagtccggcagagcacgcggaacctctacgctcgcggcttccatgacaaagacaaagagtgcagttgtagggagtctggttaccgtgccagcagaagccaaagaaagagtcaacggcaattcttgagaaaccaggggactccaaagtacaagcccagatttgtccatactcggcagacacgttccttgtccgtcgaatttgaaggtgaaatatatgacataaatctggaagaagaagaagaattgcaagtgttgcaaccaagaaacattgctaagcgtcatgatgaaggccacaaggggccaagagatctccaggcttccagtggtggcaacaggggcaggatgctggcagatagcagcaacgccgtgggcccacctaccactgtccgagtgacacacaagtgttttattcttcccaatgactctatccattgtgagagagaactgtaccaatcggccagagcgtggaaggaccataaggcatacattgacaaagagattgaagctctgcaagataaaattaagaatttaagagaagtgagaggacatctgaagagaaggaagcctgaggaatgtagctgcagtaaacaaagctattacaataaagagaaaggtgtaaaaaagcaagagaaattaaagagccatcttcacccattcaaggaggctgctcaggaagtagatagcaaactgcaacttttcaaggagaacaaccgtaggaggaagaaggagaggaaggagaagagacggcagaggaagggggaagagtgcagcctgcctggcctcacttgcttcacgcatgacaacaaccactggcagacagccccgttctggaacctgggatctttctgtgcttgcacgagttctaacaataacacctactggtgtttgcgtacagttaatgagacgcataattttcttttctgtgagtttgctactggctttttggagtattttgatatgaatacagatccttatcagctcacaaatacagtgcacacggtagaacgaggcattttgaatcagctacacgtacaactaatggagctcagaagctgtcaaggatataagcagtgcaacccaagacctaagaatcttgatgttggaaataaagatggaggaagctatgacctacacagaggacagttatgggatggatgggaaggttaatcagccccgtctcactgcagacatcaactggcaaggcctagaggagctacacagtgtgaatgaaaacatctatgagtacagacaaaactacagacttagtctggtggactggactaattacttgaaggatttagatagagtatttgcactgctgaagagtcactatgagcaaaataaaacaaataagactcaaactgctcaaagtgacgggttcttggttgtctctgctgagcacgctgtgtcaatggagatggcctctgctgactcagatgaagacccaaggcataaggttgggaaaacacctcatttgaccttgccagctgaccttcaaaccctgcatttgaaccgaccaacattaagtccagagagtaaacttgaatggaataacgacattccagaagttaatcatttgaattctgaacactggagaaaaaccgaaaaatggacggggcatgaagagactaatcatctggaaaccgatttcagtggcgatggcatgacagagctagagctcgggcccagccccaggctgcagcccattcgcaggcacccgaaagaacttccccagtatggtggtcctggaaaggacatttttgaagatcaactatatcttcctgtgcattccgatggaatttcagttcatcagatgttcaccatggccaccgcagaacaccgaagtaattccagcatagcggggaagatgttgaccaaggtggagaagaatcacgaaaaggagaagtcacagcacctagaaggcagcgcctcctcttcactctcctctgattagatgaaactgttaccttaccctaaacacagtatttctttttaacttttttatttgtaaactaataaaggtaatcacagccaccaacattccaagctaccctgggtacctttgtgcagtagaagctagtgagcatgtgagcaagcggtgtgcacacggagactcatcgttataatttactatctgccaagagtagaaagaaaggctggggatatttgggttggcttggttttgattttttgcttgtttgtttgttttgtactaaaacagtattatcttttgaatatcgtagggacataagtatatacatgttatccaatcaagatggctagaatggtgcctttctgagtgtctaaaacttgacacccctggtaaatctttcaacacacttccactgcctgcgtaatgaagttttgattcatttttaaccactggaatttttcaatgccgtcattttcagttagatgattttgcactttgagattaaaatgccatgtctatttgattagtcttatttttttatttttacaggcttatcagtctcactgttggctgtcattgtgacaaagtcaaataaacccccaaggacgacacacagtatggatcacatattgtttgacattaagcttttgccagaaaatgttgcatgtgttttacctcgacttgctaaaatcgattagcagaaaggcatggctaataatgttggtggtgaaaataaataaataagtaaacaaaatgaagattgcctgctctctctgtgcctagcctcaaagcgttcatcatacatcatacctttaagattgctatattttgggttattttcttgacaggagaaaaagatctaaagatcttttattttcatcttttttggttttcttggcatgactaagaagcttaaatgttgataaaatatgactagttttgaatttacaccaagaacttctcaataaaagaaaatcatgaatgctccacaatttcaacataccacaagagaagttaatttcttaacattgtgttctatgattatttgtaagaccttcaccaagttctgatatcttttaaagacatagttcaaaattgcttttgaaaatctgtattcttgaaaatatccttgttgtgtattaggtttttaaataccagctaaaggattacctcactgagtcatcagtaccctcctattcagctccccaagatgatgtgtttttgcttaccctaagagaggttttcttcttatttttagataattcaagtgcttagataaattatgttttctttaagtgtttatggtaaactcttttaaagaaaatttaatatgttatagctgaatctttttggtaactttaaatctttatcatagactctgtacatatgttcaaattagctgcttgcctgatgtgtgtatcatcggtgggatgacagaacaaacatatttatgatcatgaataatgtgctttgtaaaaagatttcaagttattaggaagcatactctgttttttaatcatgtataatattccatgatacttttatagaacaattctggcttcaggaaagtctagaagcaatatttcttcaaataaaaggtgtttaaacttt

SEQ ID NO: 563 - DNA, 1049 bp, Homo sapiens
gcattccccacacaacacccacactcagccactgcgggcgaggagggcacgaggccaggttcccaagagctcaggaacatggagctgatccaggacatctctcgcccgccactggagtacgtgaagggggtcccgctcatcaagtactttgcagaggcactggggcccctgcagagcttccaggcccggcctgatgacctgctcatcagcacctaccccaagtccggcaccacctgggtgagccagattctggacatgatctaccagggcggtgacctggaaaagtgtcaccgagctcccatcttcatgcgggtgcccttccttgagttcaaagtcccagggattccctcagggatggagactctgaaaaacacaccagccccacgactcctgaagacacacctgcccctggctctgctcccccagactctgttggatcagaaggtcaaggtggtctatgttgcccgcaacgcaaaggatgtggcggtttcctactaccacttctaccacatggccaaagtgtaccctcaccctgggacctgggaaagcttcctggagaagttcatggctggagaagtgtcctatgggtcctggtaccagcacgtgcaagagtggtgggagctgagccgcacccaccctgttctctacctcttctatgaagacatgaaggagaaccccaaaagggagattcaaaagatcctggagtttgtggggcgctccctgccagaggagactgtggacctcatggttgagcacacgtcgttcaaggagatgaagaagaaccctatgaccaactacaccaccgtccgccgggagttcatggaccacagcatctcccccttcatgaggaaaggcatggctggggactggaagaccaccttcaccgtggcgcagaatgagcgcttcgatgcggactatgcggagaagatggcaggctgcagcctcagcttccgctctgagctgtgagaggggttcctggagtcactgcagagggagtgtgcgaatcaagcctgaccaagaggctccagaataaagtatgatttgtgttc

SEQ ID NO: 564 - DNA, 1322 bp, Homo sapiens
gtttgtcctggagcccagatggactgtggccgggcaagtggatcacaggcctggccagcctaggagttgccacatgtgaggggccgaggggctcaaggaggggaacatcggggagaggagcctactgggtggaggctgggggtcccagcaggaaatggtgagacaaagggcgctggctggcaggaagacagcacaggaaggtcctagaggttcctcagtgcagctggactctcctggagaccttcacacaccctgacatctgggccccgcgccacgagggtgctttcactggtctgcaccatggcccaggccctgggattttgaacagctccgcaggtgaatgaaaggaacatggagctgatccaggacatctctcgcccgccactggagtacgtgaagggggtcccgctcatcaagtactttgcagaggcactggggcccctgcagagcttccaggcccggcctgatgacctgctcatcagcacctaccccaagtccggcaccacctgggtgagccagattctggacatgatctaccagggcggtgacctggaaaagtgtcaccgagctcccatcttcatgcgggtgcccttccttgagttcaaagtcccagggattccctcagggatggagactctgaaaaacacaccagccccacgactcctgaagacacacctgcccctggctctgctcccccagactctgttggatcagaaggtcaaggtggtctatgttgcccgcaacgcaaaggatgtggcggtttcctactaccacttctaccacatggccaaagtgtaccctcaccctgggacctgggaaagcttcctggagaagttcatggctggagaagtgtcctatgggtcctggtaccagcacgtgcaagagtggtgggagctgagccgcacccaccctgttctctacctcttctatgaagacatgaaggagaaccccaaaagggagattcaaaagatcctggagtttgtggggcgctccctgccagaggagactgtggacctcatggttgagcacacgtcgttcaaggagatgaagaagaaccctatgaccaactacaccaccgtccgccgggagttcatggaccacagcatctcccccttcatgaggaaaggcatggctggggactggaagaccaccttcaccgtggcgcagaatgagcgcttcgatgcggactatgcggagaagatggcaggctgcagcctcagcttccgctctgagctgtgagaggggttcctggagtcactgcagagggagtgtgcgaatcaagcctgaccaagaggctccagaataaagtatgatttgtgttc

SEQ ID NO: 565 - DNA, 1421 bp, Homo sapiens
acactggaccttcaaaaccctcagggcagagagcagccctacactccctacaccacacccatactcagcccctgcaggcaaggagagaacaggtcaggttcccgagagctcaggaacatggagctgatccaggacacctcccgcccgccactggagtacgtgaagggggtcccgctcatcaagtactttgcagaggcactggggcccctgcagagcttccaagcccgacctgatgacctgctcatcaacacctaccccaagtctggcaccacctgggtgagccagatactggacatgatctaccagggcggcgacctagagaagtgtaaccgggctcccatctacgtacgggtgcccttccttgaggtcaatgatccaggggaaccctcagggctggagactctgaaagacacaccgcccccacggctcatcaagtcacacctgcccctggctctgctccctcagactctgttggatcagaaggtcaaggtggtctatgttgcccgaaacccaaaggacgtggcggtctcctactaccatttccaccgtatggaaaaggcgcaccctgagcctgggacctgggacagcttcctggaaaagttcatggctggagaagtgtcctacgggtcctggtaccagcacgtgcaggagtggtgggagctgagccgcacccaccctgttctctacctcttctatgaagacatgaaggagaaccccaaaagggagattcaaaagatcctggagtttgtggggcgctccctgccagaggagaccatggacttcatggttcagcacacgtcgttcaaggagatgaagaagaaccctatgaccaactacaccaccgtcccccaggagctcatggaccacagcatctcccccttcatgaggaaaggcatggctggggactggaagaccaccttcaccgtggcgcagaatgagcgcttcgatgcggactatgcggagaagatggcaggctgcagcctcagcttccgctctgagctgtgagaggggctcctggagtcactgcagagggagtgtgcgaatctaccctgaccaatgggctcaagaataaagtatgatttttgagtcaggcacagtggctcatgtctgcaatcccagcgatttgggaggttgagctggtaggatcacaataggccacgaatttgagaccagcctggtaaaatagtgagacctcatctctacaaagatgtaaaaaaattagccacatgtgctggcacttacctgtagtcccagctacttgggaagcagaggctggaggatcatttcagcccaggaggttgtggatacagtgagttatgacatgcccattcactacagcctggatgacaagcaagaccctccctccaaagaaaataaagctcaattaaaataaaatatgatttgtgttcatgtaaaaaaaa

SEQ ID NO: 566 - DNA, 1441 bp, Homo sapiens
gtgacggggaggcggtgcccggggcatctccgcggcggaactcagctgtgagaagtcactgctttggggagacctgatctggctgtgccagatggacactgagaaagaagtagaagactcagaattagaagaggaacatggagctgatccaggacacctcccgcccgccactggagtacgtgaagggggtcccgctcatcaagtactttgcagaggcactggggcccctgcagagcttccaagcccgacctgatgacctgctcatcaacacctaccccaagtctggcaccacctgggtgagccagatactggacatgatctaccagggcggcgacctagagaagtgtaaccgggctcccatctacgtacgggtgcccttccttgaggtcaatgatccaggggaaccctcagggctggagactctgaaagacacaccgcccccacggctcatcaagtcacacctgcccctggctctgctccctcagactctgttggatcagaaggtcaaggtggtctatgttgcccgaaacccaaaggacgtggcggtctcctactaccatttccaccgtatggaaaaggcgcaccctgagcctgggacctgggacagcttcctggaaaagttcatggctggagaagtgtcctacgggtcctggtaccagcacgtgcaggagtggtgggagctgagccgcacccaccctgttctctacctcttctatgaagacatgaaggagaaccccaaaagggagattcaaaagatcctggagtttgtggggcgctccctgccagaggagaccatggacttcatggttcagcacacgtcgttcaaggagatgaagaagaaccctatgaccaactacaccaccgtcccccaggagctcatggaccacagcatctcccccttcatgaggaaaggcatggctggggactggaagaccaccttcaccgtggcgcagaatgagcgcttcgatgcggactatgcggagaagatggcaggctgcagcctcagcttccgctctgagctgtgagaggggctcctggagtcactgcagagggagtgtgcgaatctaccctgaccaatgggctcaagaataaagtatgatttttgagtcaggcacagtggctcatgtctgcaatcccagcgatttgggaggttgagctggtaggatcacaataggccacgaatttgagaccagcctggtaaaatagtgagacctcatctctacaaagatgtaaaaaaattagccacatgtgctggcacttacctgtagtcccagctacttgggaagcagaggctggaggatcatttcagcccaggaggttgtggatacagtgagttatgacatgcccattcactacagcctggatgacaagcaagaccctccctccaaagaaaataaagctcaattaaaataaaatatgatttgtgttcatgtaaaaaaaa

SEQ ID NO: 567 - DNA, 1391 bp, Homo sapiens
acactggaccttcaaaaccctcagggcagagagcagccctacactccctacaccacacccatactcagcccctgcaggcaaggagagaacaggtcaggttcccgagagctcaggaacatggagctgatccaggacacctcccgcccgccactggagtacgtgaagggggtcccgctcatcaagtactttgcagaggcactggggcccctgcagagcttccaagcccgacctgatgacctgctcatcaacacctaccccaagtctggcaccacctgggtgagccagatactggacatgatctaccagggcggcgacctagagaagtgtaaccgggctcccatctacgtacgggtgcccttccttgaggtcaatgatccaggggaaccctcagggctggagactctgaaagacacaccgcccccacggctcatcaagtcacacctgcccctggctctgctccctcagactctgttggatcagaaggtcaaggtggtctatgttgcccgaaacccaaaggacgtggcggtctcctactaccatttccaccgtatggaaaaggcgcaccctgagcctgggacctgggacagcttcctggaaaagttcatggctggagaagtgtcctacgggtcctggtaccagcacgtgcaggagtggtgggagctgagccgcacccaccctgttctctacctcttctatgaagacatgaaggagaaccccaaaagggagattcaaaagatcctggagtttgtggggcgctccctgccagaggagaccatggacttcatggttcagcacacgtcgttcaaggagatgaagaagaaccctatgaccaactacaccaccgtcccccaggagctcatggaccacagcatctcccccttcatgaggaaaggcatggctggggactggaagaccaccttcaccgtggcgcagaatgagcgcttcgatgcggactatgcggagaagatggcaggctgcagcctcagcttccgctctgagctgtgagaggggctcctggagtcactgcagagggagtgtgcgaatctaccctgaccaatgggctcaagaataaagtatgatttttgagtcaggcacagtggctcatgtctgcaatcccagcgatttgggaggttgagctggtaggatcacaataggccacgaatttgagaccagcctggtaaaatagtgagacctcatctctacaaagatgtaaaaaaattagccacatgtgctggcacttacctgtagtcccagctacttgggaagcagaggctggaggatcatttcagcccaggaggttgtggatacagtgagttatgacatgcccattcactacagcctggatgacaagcaagaccctccctccaaagaaaataaagctcaaaataaaa

SEQ ID NO: 568 - DNA, 1411 bp, Homo sapiens
gtgacggggaggcggtgcccggggcatctccgcggcggaactcagctgtgagaagtcactgctttggggagacctgatctggctgtgccagatggacactgagaaagaagtagaagactcagaattagaagaggaacatggagctgatccaggacacctcccgcccgccactggagtacgtgaagggggtcccgctcatcaagtactttgcagaggcactggggcccctgcagagcttccaagcccgacctgatgacctgctcatcaacacctaccccaagtctggcaccacctgggtgagccagatactggacatgatctaccagggcggcgacctagagaagtgtaaccgggctcccatctacgtacgggtgcccttccttgaggtcaatgatccaggggaaccctcagggctggagactctgaaagacacaccgcccccacggctcatcaagtcacacctgcccctggctctgctccctcagactctgttggatcagaaggtcaaggtggtctatgttgcccgaaacccaaaggacgtggcggtctcctactaccatttccaccgtatggaaaaggcgcaccctgagcctgggacctgggacagcttcctggaaaagttcatggctggagaagtgtcctacgggtcctggtaccagcacgtgcaggagtggtgggagctgagccgcacccaccctgttctctacctcttctatgaagacatgaaggagaaccccaaaagggagattcaaaagatcctggagtttgtggggcgctccctgccagaggagaccatggacttcatggttcagcacacgtcgttcaaggagatgaagaagaaccctatgaccaactacaccaccgtcccccaggagctcatggaccacagcatctcccccttcatgaggaaaggcatggctggggactggaagaccaccttcaccgtggcgcagaatgagcgcttcgatgcggactatgcggagaagatggcaggctgcagcctcagcttccgctctgagctgtgagaggggctcctggagtcactgcagagggagtgtgcgaatctaccctgaccaatgggctcaagaataaagtatgatttttgagtcaggcacagtggctcatgtctgcaatcccagcgatttgggaggttgagctggtaggatcacaataggccacgaatttgagaccagcctggtaaaatagtgagacctcatctctacaaagatgtaaaaaaattagccacatgtgctggcacttacctgtagtcccagctacttgggaagcagaggctggaggatcatttcagcccaggaggttgtggatacagtgagttatgacatgcccattcactacagcctggatgacaagcaagaccctccctccaaagaaaataaagctcaaaataaaa

SEQ ID NO: 569 - DNA, 1946 bp, Homo sapiens
aaggaataaagttgctgattcattcctttacactgaaaccctttgttgtgccctcctcttccttcctctttatagggagacactctgagaaagagcacattgtgggggcccactccatgtgatgtttgcttggttgcctgttcccttttctacctgcagagcacggttcccataagggcggcgagatcagcctcctgtctcatctggaagaccaccactctggggtctcagaggaatgatggaagccttggggtttctaaaattggaagtgaatggccccatggtgacggtggccctgtcagtggctctcttggccctcctgaaatggtactccacatcagcattctcaagactggagaagttaggcctcagacatcccaagccttctcctttcattggaaacttgacatttttccgccagggtttttgggaaagccaaatggagctcagaaagctgtatggacctctgtgtgggtactatcttggtcgtcggatgtttattgttatttctgagccagacatgatcaagcaggtgttggttgagaacttcagtaactttaccaacagaatggcgtcgggtttggagttcaagtcggtagccgacagcgttctgtttttacgtgacaaaagatgggaagaggtcagaggtgccctgatgtctgctttcagtcctgaaaagctgaacgagatggttcccctcatcagccaagcctgcgaccttctcctggctcatttaaaacgctatgcggaatctggggacgcatttgacatccagaggtgctactgcaattacaccacagatgtggttgccagcgtcccgtttggcaccccggtggactcctggcaggcccctgaggatccctttgtgaaacactgcaagcgtttcttcgaattctgcatccccagacctatcctggttttactcttatcatttccatccataatggtcccactggcccggattttgcccaataagaaccgagacgaactgaatggcttttttaacaaactcattaggaatgtgattgccttgcgggaccagcaagctgccgaagagaggcggagagacttcctccaaatggtcctggatgcccgacattctgcaagtcccatgggcgtgcaagactttgacatcgtcagagacgttttctcctctactgggtgcaagccgaacccttcccggcaacaccagcccagccctatggccaggcctttgactgtggatgagattgtgggccaggccttcatcttcctcatcgctggctatgaaatcatcaccaacacactttcttttgccacctacctactggccaccaaccctgactgccaagagaagcttctgagagaggtagacgtttttaaggagaaacacatggcccctgagttctgcagcctcgaggaaggcctgccctatctggacatggtgattgcagagacgctgaggatgtacccgccagctttcagattcacacgggaggcagctcaggactgcgaggtgctggggcagcgcatccccgcaggcgctgtgctagagatggccgtgggtgccctgcaccatgaccctgagcactggccaagcccggagaccttcaaccctgaaaggttcacggctgaggcccggcagcagcaccggcccttcacgtacctgcccttcggggccggcccacggagctgcctcggggtgcgtctagggctgcttgaggtcaagttgacactgctccacgtgctgcacaagttccggttccaagcctgccctgagacccaggtaccgctgcagctagaatccaaatctgccctaggtccaaaaaatggtgtctatatcaagatcgtatcccgctgacacagaaggctgccgggtggggggagggcacccccaaattcaaagaaaaccctaagtgtggatgttcagaattttggaaaaatgtcactgaagtgattgaaagccg

SEQ ID NO: 570 - DNA, 1783 bp, Homo sapiens
aaggaataaagttgctgattcattcctttacactgaaaccctttgttgtgccctcctcttccttcctctttatagggagacactctgagaaagagcacattgtgggggcccactccatgtgatgtttgcttggttgcctgttcccttttctacctgcagagcacggttcccataagggcggcgagatcagcctcctgtctcatctggaagaccaccactctggggtctcagaggaatgatggaagccttggggtttctaaaattggaagtgaatggccccatggtgacggtggccctgtcagtggctctcttggccctcctgaaatggtactccacatcagcattctcaagactggagaagttaggcctcagacatcccaagccttctcctttcattggaaacttgacatttttccgccagggtttttgggaaagccaaatggagctcagaaagctgtatggacctctgtgtgggtactatcttggtcgtcggatgtttattgttatttctgagccagacatgatcaagcaggtgttggttgagaacttcagtaactttaccaacagaatggcgtcgggtttggagttcaagtcggtagccgacagcgttctgtttttacgtgacaaaagatgggaagaggtcagaggtgccctgatgtctgctttcagtcctgaaaagctgaacgagatggttcccctcatcagccaagcctgcgaccttctcctggctcatttaaaacgctatgcggaatctggggacgcatttgacatccagaggtgctactgcaattacaccacagatgtggttgccagcgtcccgtttggcaccccggtggactcctggcaggcccctgaggatccctttgtgaaacactgcaagcgtttcttcgaattctgcatccccagacctatcctggttttactcttatcatttccatccataatggtcccactggcccggattttgcccaataagaaccgagacgaactgaatggcttttttaacaaactcattaggaatgtgattgccttgcgggaccagcaagctgccgaagagaggcggagagacttcctccaaatggtcctggatgcccgacattctgcaagtcccatgggcgtgcaagactttgacatcgtcagagacgttttctcctctactgggtgcaagccgaacccttcccggcaacaccagcccagccctatggccaggcctttgactgtggatgagattgtgggccaggccttcatcttcctcatcgctggctatgaaatcatcaccaacacactttcttttgccacctacctactggccaccaaccctgactgccaagagaagcttctgagagaggtagacgtttttaaggagaaacacatggcccctgagttctgcagcctcgaggaaggcctgccctatctggacatggtgattgcagagacgctgaggatgtacccgccagctttcagattcacacgggaggcagctcaggactgcgaggtgctggggcagcgcatccccgcaggcgctgtgctagagatggccgtgggtgccctgcaccatgaccctgagcactggccaagcccggagaccttcaaccctgaaaggtaccgctgcagctagaatccaaatctgccctaggtccaaaaaatggtgtctatatcaagatcgtatcccgctgacacagaaggctgccgggtggggggagggcacccccaaattcaaagaaaaccctaagtgtggatgttcagaattttggaaaaatgtcactgaagtgattgaaagccg

SEQ ID NO: 571 - DNA, 1712 bp, Homo sapiens
aaggtcaatgatagcatctgcctagagtcaaacctccgtgcttctcagacagtgccttttcaccatgagtgggtgcccatttttaggaaacaactttggatatacttttaaaaaactccccgtagaaggcagcgaagaagacaaatcacaaactggtgtgaatagagccagcaaaggaggtcttatctatgggaactacctgcatttggaaaaagttttgaatgcacaagaactgcaaagtgaaacaaaaggaaataaaatccatgatgaacatctttttatcataactcatcaagcttatgaactctggtttaagcaaatcctctgggagttggattctgttcgagagatctttcagaatggccatgtcagagatgaaaggaacatgcttaaggttgtttctcggatgcaccgagtgtcagtgatcctgaaactgctggtgcagcagttttccattctggagacgatgacagccttggacttcaatgacttcagagagtacttatctccagcatcaggcttccagagtttgcaattccgactattagaaaacaagataggtgttcttcagaacatgagagtcccttataacagaagacattatcgtgataacttcaaaggagaagaaaatgaactgctacttaaatctgagcaggaaaagacacttctggaattagtggaggcatggctggaaagaactccaggtttagagccacatggatttaacttctggggaaagcttgaaaaaaatatcaccagaggcctggaagaggaattcataaggattcaggctaaagaagagtctgaagaaaaagaggaacaggtggctgaatttcagaagcaaaaagaggtgctactgtccttatttgatgagaaacgtcatgaacatctccttagtaaaggtgaaagacggctgtcatacagagcacttcagggagcattgatgatatatttttacagggaagagcctaggttccaggtgccttttcagttgctgacttctcttatggacatagattcactgatgaccaaatggagatataaccatgtgtgcatggtgcacagaatgctgggcagcaaagctggcaccggtggttcctcaggctatcactacctgcgatcaactgtgagtgataggtacaaggtatttgtagatttatttaatctttcaacatacctgattccccgacactggataccgaagatgaacccaaccattcacaaatttctatatacagcagaatactgtgatagctcctacttcagcagtgatgaatcagattaaaatcgtctgcaaaatctatgaagaatactggtttcacagcctattttttattttctatggattttcataaatacagtttgaatatatgtatgcatatattgttcagcaccacgatgctctgatttaattctagaaacaatttgattacctcttgtttgtgacaagactaagcattaagatgagaaagaatacatttaaatagtaacattgtacatagggtgttttcctattaaaaatcagtttcccctgagacttaatgtaaccacttaatgtaatcactatctcattgtttcatctttataaacttgtaaacttcatctatttcaaatattttatgcagtacattatattattctgtacaaaggctttcaaacaaaatttttaaaataataaagtattaatctttcaaaaaaaaaaaaaaaaaaaa

SEQ ID NO: 572 - DNA, 1203 bp, Homo sapiens
agaaagccgcgcacctcctcccgccaggcgctttctcggacgccttgcccagcgggccgcccgaccccctgcaccatggaccccgctcgccccctggggctgtcgattctgctgcttttcctgacggaggctgcactgggcgatgctgctcaggagccaacaggaaataacgcggagatctgtctcctgcccctagactacggaccctgccgggccctacttctccgttactactacgacaggtacacgcagagctgccgccagttcctgtacgggggctgcgagggcaacgccaacaatttctacacctgggaggcttgcgacgatgcttgctggaggatagaaaaagttcccaaagtttgccggctgcaagtgagtgtggacgaccagtgtgaggggtccacagaaaagtatttctttaatctaagttccatgacatgtgaaaaattcttttccggtgggtgtcaccggaaccggattgagaacaggtttccagatgaagctacttgtatgggcttctgcgcaccaaagaaaattccatcattttgctacagtccaaaagatgagggactgtgctctgccaatgtgactcgctattattttaatccaagatacagaacctgtgatgctttcacctatactggctgtggagggaatgacaataactttgttagcagggaggattgcaaacgtgcatgtgcaaaagctttgaaaaagaaaaagaagatgccaaagcttcgctttgccagtagaatccggaaaattcggaagaagcaattttaaacattcttaatatgtcatcttgtttgtctttatggcttatttgcctttatggttgtatctgaagaataatatgacagcatgaggaaacaaatcattggtgatttattcaccagtttttattaatacaagtcactttttcaaaaatttggatttttttatatataactagctgctattcaaatgtgagtctaccatttttaatttatggttcaactgtttgtgagactgaattcttgcaatgcataagatataaaagcaaatatgactcactcatttcttggggtcgtattcctgatttcagaagaggatcataactgaaacaacataagacaatataatcatgtgcttttaacatatttgagaataaaaaggactagcaaataaaacacaaaaaaaaaaaaaaaaaaaaaaaaaaaaaaa

SEQ ID NO: 573 - DNA, 2691 bp, Homo sapiens
gcttgcccgtcggtcgctagctcgctcggtgcgcgtcgtcccgctccatggcgctcttcgtgcggctgctggctctcgccctggctctggccctgggccccgccgcgaccctggcgggtcccgccaagtcgccctaccagctggtgctgcagcacagcaggctccggggccgccagcacggccccaacgtgtgtgctgtgcagaaggttattggcactaataggaagtacttcaccaactgcaagcagtggtaccaaaggaaaatctgtggcaaatcaacagtcatcagctacgagtgctgtcctggatatgaaaaggtccctggggagaagggctgtccagcagccctaccactctcaaacctttacgagaccctgggagtcgttggatccaccaccactcagctgtacacggaccgcacggagaagctgaggcctgagatggaggggcccggcagcttcaccatcttcgcccctagcaacgaggcctgggcctccttgccagctgaagtgctggactccctggtcagcaatgtcaacattgagctgctcaatgccctccgctaccatatggtgggcaggcgagtcctgactgatgagctgaaacacggcatgaccctcacctctatgtaccagaattccaacatccagatccaccactatcctaatgggattgtaactgtgaactgtgcccggctcctgaaagccgaccaccatgcaaccaacggggtggtgcacctcatcgataaggtcatctccaccatcaccaacaacatccagcagatcattgagatcgaggacacctttgagacccttcgggctgctgtggctgcatcagggctcaacacgatgcttgaaggtaacggccagtacacgcttttggccccgaccaatgaggccttcgagaagatccctagtgagactttgaaccgtatcctgggcgacccagaagccctgagagacctgctgaacaaccacatcttgaagtcagctatgtgtgctgaagccatcgttgcggggctgtctgtagagaccctggagggcacgacactggaggtgggctgcagcggggacatgctcactatcaacgggaaggcgatcatctccaataaagacatcctagccaccaacggggtgatccactacattgatgagctactcatcccagactcagccaagacactatttgaattggctgcagagtctgatgtgtccacagccattgaccttttcagacaagccggcctcggcaatcatctctctggaagtgagcggttgaccctcctggctcccctgaattctgtattcaaagatggaacccctccaattgatgcccatacaaggaatttgcttcggaaccacataattaaagaccagctggcctctaagtatctgtaccatggacagaccctggaaactctgggcggcaaaaaactgagagtttttgtttatcgtaatagcctctgcattgagaacagctgcatcgcggcccacgacaagagggggaggtacgggaccctgttcacgatggaccgggtgctgacccccccaatggggactgtcatggatgtcctgaagggagacaatcgctttagcatgctggtagctgccatccagtctgcaggactgacggagaccctcaaccgggaaggagtctacacagtctttgctcccacaaatgaagccttccgagccctgccaccaagagaacggagcagactcttgggagatgccaaggaacttgccaacatcctgaaataccacattggtgatgaaatcctggttagcggaggcatcggggccctggtgcggctaaagtctctccaaggtgacaagctggaagtcagcttgaaaaacaatgtggtgagtgtcaacaaggagcctgttgccgagcctgacatcatggccacaaatggcgtggtccatgtcatcaccaatgttctgcagcctccagccaacagacctcaggaaagaggggatgaacttgcagactctgcgcttgagatcttcaaacaagcatcagcgttttccagggcttcccagaggtctgtgcgactagcccctgtctatcaaaagttattagagaggatgaagcattagcttgaagcactacaggaggaatgcaccacggcagctctccgccaatttctctcagatttccacagagactgtttgaatgttttcaaaaccaagtatcacactttaatgtacatgggccgcaccataatgagatgtgagccttgtgcatgtgggggaggagggagagagatgtactttttaaatcatgttccccctaaacatggctgttaacccactgcatgcagaaacttggatgtcactgcctgacattcacttccagagaggacctatcccaaatgtggaattgactgcctatgccaagtccctggaaaaggagcttcagtattgtggggctcataaaacatgaatcaagcaatccagcctcatgggaagtcctggcacagtttttgtaaagcccttgcacagctggagaaatggcatcattataagctatgagttgaaatgttctgtcaaatgtgtctcacatctacacgtggcttggaggcttttatggggccctgtccaggtagaaaagaaatggtatgtagagcttagatttccctattgtgacagagccatggtgtgtttgtaataataaaaccaaagaaacata

SEQ ID NO: 574 - DNA, 3453 bp, Homo sapiens
aggccttttccgcttctcttttacctccccaggtccgcccgtctgcgcccctcacaggaagccggagggtcgctctgatcccgaatctcccacaggcgtgaacctgctctgctgtgtatctttgcggggtggcctgcgctgaggcctgccgcgcgcggtgagtccgcgcagacctgaccctgcgtctcgcagctcggttgaggccgccgccgccttctcgggatgccgcggccggggtccgcgcagcgctgggcggccgtcgcgggccgttgggggtgcaggctgctcgcactgctgctactggtgcctggacccggcggcgcctctgagatcaccttcgagcttcctgacaacgccaagcagtgcttctacgaggacatcgctcagggcaccaagtgcaccctggagttccaggtgattactggtggtcactatgatgtagattgtcgattagaagatcctgatggtaaagtgttatacaaagagatgaagaaacagtatgatagttttaccttcacagcctccaaaaatgggacatacaaattttgcttcagcaatgaattttctactttcacacataaaactgtatattttgattttcaagttggagaagacccacctttgtttcctagtgagaaccgagtcagtgctcttacccagatggaatctgcctgtgtttcaattcacgaagctctgaagtctgtcatcgattatcagactcatttccgtttaagagaagctcaaggccgaagccgagcagaggatctaaatacaagagtggcctattgattgaaaagaaatgctgagaaatacataaagttttcctcttctgccttggatatttataatgggtatcgggaagtctaaaataaattcctgccctctttctctctcttggggtaaaaggcacagtgtggatacaagtccaggatatcatgagtcagattccaagaagtctgaagatctatccttgtgtaatgttgctgagcacagcaatacaacagaggggccaacaggaaagcaggagggagctcagagcgtggaagagatgtttgaagaagaagctgaagaagaggtgttcctcaaatttgtgatattgcatgcagaagatgacacagatgaagccctcagagtccagaatctgctacaagatgactttggtatcaaacccggaataatctttgctgagatgccatgtggcagacagcatttacagaatttagatgatgctgtaaatgggtctgcatggacaatcttattactgactgaaaactttttaagagatacttggtgtaatttccagttctatacgtccctaatgaactccgttaacaggcagcataaatacaactctgttatacccatgcggcccctgaacaatccccttccccgagaaaggactccctttgccctccaaaccatcaatgccttagaggaagaaagtcgtggatttcctacacaagtagaaagaatttttcaggagtctgtgtataagacacaacaaactatatggaaagagacaagaaatatggtacaaagacaatttattgcctgagatgaaacatataacatgtggctggctcttgttttgtaaaccaaatgattaatcttcacttgagaaagcagtttctaggaaatgtttaaataaaagagagtcttcaccttaaagaaacctatggagcacaagaaagataaatttctgcaggacagcctataaaattgtggtactttttgatgtttcagtaaacttgacattgtcagagtttcaaggacttttctttcacaattttcctagttcatggatatgaaaaaggaattctcaatccatattccttgtattgaaccttgaacaaaaacttgtatgacagacatttttaaaaatgtgacaacacttttattctctgaattttgatctcaaaggacacagaaaaaaaatggccccaggagatctgatcacacttcctcctgaggcacctctcatggatgttgcaataagcattcgggtactatcacccagaaatatgaattgccagaatagaacatttagcatgttaagcgttgatgcatataaaatcagaaatagatgtgagaatggtggaactttttaaaagaacccagtcaaatgtattttctgctgaaatctgcatatttggaggcatttcccaccaccgattcacagcccatttgatagtgtggtagttagggacttcgtggagtggtgttcagacgtcccctggggcttaaatctcttcatattagtcatcatttgtaactatggctttatttgcagagcttctaaaaggcgtataactgtgtgagtggccagatattcactttttaaatcaaaaacctctcttatggaagctttaaaagtttccgtcacacacaattctcttctcaggaagtatttctcatttaggtcttcaaagtagcctgactgtgtgcatgtgtgtgtgtgataggttatttataaagactttggatagaaggagatgtattttattacctcctattctagagccccatgctcctaacaagccagagaggccccaaacaggattgtttctttcctccacagcccttctgcccatctgagattgagggagcatcgtccacttgagatcagggatggggtggagaatgggtcatgtcatgtaatgagaaaagccctcttcgggatcatgagacttggttctagtccaatttctgccactgaggatgaatgtaactgtgggcaaactatttaccctcctttatctgtgaaatgaaagggttgaattgatggatctctaaaggcttttgtcctctatgaggatgtgaaaaactagggaccacaaaagggaacaagcaaaaaagtttggattcgataaagtgatatgtaatagttgcagaaggctttatatatgcttataatgaaaagatattttttgtatattgacagcataatttatttttaatgctgtcattacacttaaagtcacaggaaaaaaatatacatgcttactcaggctttcttaaaaataaatttttatagagatccttgagtaaagacattttgcttaatttcttttttcttattccccacttgtatatcccctaccagtaccgggatctgcacacatctttttgcagttacctcttcatagccatgaaccaaaacgttctatgaggagcatgcaagtaagtcaagcctcctattctgttagtacttattagaggaggagatggttttcattgcatagtgacattttcttagccttaacgttctgatagtagcttactactcacttctctttttcagttttcataataagtattcatttttttgccataatgcttcctgtaaagccaattttatatactaataaaacatgaactgcccactcttcatgcctgccaaacttggggcaattgatgctaaatggtatttttaaaataaatgtttttattctt

SEQ ID NO: 575 - DNA, 931 bp, Homo sapiens
tttcgtcggcccgccccttggcttctgcactgatggtgggtggatgagtaatgcatccaggaagcctggaggcctgtggtttccgcacccgctgccacccccgcccctagcgtggacatttatcctctagcgctcaggccctgccgccatcgccgcagatccagcgcccagagagacaccagagaacccaccatggccccctttgagcccctggcttctggcatcctgttgttgctgtggctgatagcccccagcagggcctgcacctgtgtcccaccccacccacagacggccttctgcaattccgacctcgtcatcagggccaagttcgtggggacaccagaagtcaaccagaccaccttataccagcgttatgagatcaagatgaccaagatgtataaagggttccaagccttaggggatgccgctgacatccggttcgtctacacccccgccatggagagtgtctgcggatacttccacaggtcccacaaccgcagcgaggagtttctcattgctggaaaactgcaggatggactcttgcacatcactacctgcagttttgtggctccctggaacagcctgagcttagctcagcgccggggcttcaccaagacctacactgttggctgtgaggaatgcacagtgtttccctgtttatccatcccctgcaaactgcagagtggcactcattgcttgtggacggaccagctcctccaaggctctgaaaagggcttccagtcccgtcaccttgcctgcctgcctcgggagccagggctgtgcacctggcagtccctgcggtcccagatagcctgaatcctgcccggagtggaagctgaagcctgcacagtgtccaccctgttcccactcccatctttcttccggacaatgaaataaagagttaccacccagcagaaaaaaaaaaaaaaaa

SEQ ID NO: 576 - DNA, 1794 bp, Homo sapiens
gaagtatactcattcaagtaaaggatcagtttcagggttcaggctgaagtgtcttaatgactagaattcaggttccaaggagaagcccacaaggctaagggtattggatataacggaaagtggaagctatacctgacttccagagaatgtggaccggatataagatcttaatcttctcttatcttactacagaaatctggatggagaagcggtatttatctcaaagagaagtggacctagaggcttatttcactaggaatcacaccgttttgcaaggtactcgattcaaaagagccattttccaagggcaatactgtagaaattttggctgttgtgaagacagagatgatggctgtgtcactgagttctatgcggcgaatgcgttgtgctactgtgataaattctgtgacagagaaaattctgattgctgtcctgactacaagtccttttgccgtgaagagaaagaatggcctcctcacacacagccttggtatccagaaggttgcttcaaagatggtcaacattatgaagagggatcagtaattaaagaaaactgcaactcctgcacatgctcaggacagcaatggaaatgttcccagcatgtatgccttgttcgttcagaattaattgaacaggtcaataaaggagactatggatggacagcacagaattacagccaattttggggaatgactttagaagatggttttaaatttcgccttggcactttgccacctagtctcatgctcctgagcatgaatgaaatgacagcttctttacctgcaacaactgatcttccagagttttttgttgcttcttataaatggcctggatggactcatggcccattggatcaaaaaaattgtgctgcatcctgggcattttccactgcaagtgtggctgctgaccgaatagcaattcagtctaagggtcgatacacggccaatctatcccctcagaatttgatctcttgctgtgccaagaaccgtcatggatgcaatagtggaagcatcgatagggcttggtggtacctgagaaaacgtggactggtatcccacgcatgctacccacttttcaaagaccaaaatgctaccaacaatggatgtgccatggcaagcaggtctgatgggcgaggaaaacggcatgccacgaagccatgtcccaacaacgtagaaaaatctaacaggatctatcaatgttctcctccatacagagtctcttccaacgaaactgagataatgaaagaaatcatgcaaaatggaccagttcaagccataatgcaagtccatgaagatttcttccattataagacagggatatacagacatgttaccagcacaaataaagaatcagaaaaatatcgaaagcttcagacacatgcagtcaaactcactggatggggcacactgagaggagcacaagggcagaaagaaaaattttggattgctgccaattcctggggaaagtcatggggagagaatggctatttcaggattcttcgaggagtaaatgagtccgacattgaaaagttgattatcgcagcttggggccaactgacgagttctgatgaaccataacatatcattaaatttccataaggtcatgcctttaagtaaccccctaaattgaagtttagcaatatgacattcttggtgacagtggaatctttgtctcttcaccgtgttaacataatctatctattttcttattttcccctctggtctatgcttctgcttccttcatattactgagcattaacaacaccaaaaaaaaaaaaaaaaaaaaaaaaaaaaa

SEQ ID NO: 577 - DNA, 2867 bp, Homo sapiens
acagactgccaaatggaacagacaagcaggttgtcttgtgttaaagaaaatgagatataagtcagttactcccggaggcaatgctgctgttcagctcttctgtttttgtggccagggtcttcatgaacactaataggggtaccaggccctcttcctcgttagaagaaatcaggataacaaaggcatattgggcacccctacaaaaggaatctgtatctgtatcaagatgatctgaagaacagcttctacctttaggaatgtctagtgttccaaaatgactagcatcttccattttgccattatcttcatgttaatacttcagatcagaatacaattatctgaagaaagtgaatttttagttgataggtcaaaaaacggtctcatccacgttcctaaagacctatcccagaaaacaacaatcttaaatatatcgcaaaattatatatctgagctttggacttctgacatcttatcactgtcaaaactgaggattttgataatttctcataatagaatccagtatcttgatatcagtgttttcaaattcaaccaggaattggaatacttggatttgtcccacaacaagttggtgaagatttcttgccaccctactgtgaacctcaagcacttggacctgtcatttaatgcatttgatgccctgcctatatgcaaagagtttggcaatatgtctcaactaaaatttctggggttgagcaccacacacttagaaaaatctagtgtgctgccaattgctcatttgaatatcagcaaggtcttgctggtcttaggagagacttatggggaaaaagaagaccctgagggccttcaagactttaacactgagagtctgcacattgtgttccccacaaacaaagaattccattttattttggatgtgtcagtcaagactgtagcaaatctggaactatctaatatcaaatgtgtgctagaagataacaaatgttcttacttcctaagtattctggcgaaacttcaaacaaatccaaagttatcaaatcttaccttaaacaacattgaaacaacttggaattctttcattaggatcctccagctggtttggcatacaactgtatggtatttctcaatttcaaacgtgaagctacagggtcagctggacttcagagattttgattattctggcacttccttgaaggccttgtctatacaccaagttgtcagcgatgtgttcggttttccgcaaagttatatctatgaaatcttttcgaatatgaacatcaaaaatttcacagtgtctggtacacgcatggtccacatgctttgcccatccaaaattagcccgttcctgcatttggatttttccaataatctcttaacagacacggtttttgaaaattgtgggcaccttactgagttggagacacttattttacaaatgaatcaattaaaagaactttcaaaaatagctgaaatgactacacagatgaagtctctgcaacaattggatattagccagaattctgtaagctatgatgaaaagaaaggagactgttcttggactaaaagtttattaagtttaaatatgtcttcaaatatacttactgacactattttcagatgtttacctcccaggatcaaggtacttgatcttcacagcaataaaataaagagcattcctaaacaagtcgtaaaactggaagctttgcaagaactcaatgttgctttcaattctttaactgaccttcctggatgtggcagctttagcagcctttctgtattgatcattgatcacaattcagtttcccacccatcggctgatttcttccagagctgccagaagatgaggtcaataaaagcaggggacaatccattccaatgtacctgtgagctaggagaatttgtcaaaaatatagaccaagtatcaagtgaagtgttagagggctggcctgattcttataagtgtgactacccggaaagttatagaggaaccctactaaaggactttcacatgtctgaattatcctgcaacataactctgctgatcgtcaccatcgttgccaccatgctggtgttggctgtgactgtgacctccctctgcagctacttggatctgccctggtatctcaggatggtgtgccagtggacccagacccggcgcagggccaggaacatacccttagaagaactccaaagaaatctccagtttcatgcatttatttcatatagtgggcacgattctttctgggtgaagaatgaattattgccaaacctagagaaagaaggtatgcagatttgccttcatgagagaaactttgttcctggcaagagcattgtggaaaatatcatcacctgcattgagaagagttacaagtccatctttgttttgtctcccaactttgtccagagtgaatggtgccattatgaactctactttgcccatcacaatctctttcatgaaggatctaatagcttaatcctgatcttgctggaacccattccgcagtactccattcctagcagttatcacaagctcaaaagtctcatggccaggaggacttatttggaatggcccaaggaaaagagcaaacgtggccttttttgggctaacttaagggcagccattaatattaagctgacagagcaagcaaagaaatagattacacatcaagtgaaaaatattcctcctgttgatattgctgcttttggaagttccaacaatgactttattttgcatcagcatagatgtaaacacaattgtgagtgtatgatgtaggtaaaaatatataccttcgggtcgcagttcaccatttatatgtggtattaaaaattaatgaaatgatataactttgatttaaacagttctgacacataaaaaaaaaaaaaaaaaa

SEQ ID NO: 578 - DNA, 3417 bp, Homo sapiens
cggaggcagcgagaaagcgcagccaggcggctgctcggcgttctctcaggtgactgctcggagttctcccagtgtttggtgttgcaagcaggatccaaaggagacctatagtgactcccaggagctcttagtgaccaagtgaaggtacctgtggggctcattgtgcccattgctctttcactgctttcaactggtagttgtgggttgaagcactggacaatgccacatactttgtggatggtgtgggtcttgggggtcatcatcagcctctccaaggaagaatcctccaatcaggcttctctgtcttgtgaccgcaatggtatctgcaagggcagctcaggatctttaaactccattccctcagggctcacagaagctgtaaaaagccttgacctgtccaacaacaggatcacctacattagcaacagtgacctacagaggtgtgtgaacctccaggctctggtgctgacatccaatggaattaacacaatagaggaagattctttttcttccctgggcagtcttgaacatttagacttatcctataattacttatctaatttatcgtcttcctggttcaagcccctttcttctttaacattcttaaacttactgggaaatccttacaaaaccctaggggaaacatctcttttttctcatctcacaaaattgcaaatcctgagagtgggaaatatggacaccttcactaagattcaaagaaaagattttgctggacttaccttccttgaggaacttgagattgatgcttcagatctacagagctatgagccaaaaagtttgaagtcaattcagaatgtaagtcatctgatccttcatatgaagcagcatattttactgctggagatttttgtagatgttacaagttccgtggaatgtttggaactgcgagatactgatttggacactttccatttttcagaactatccactggtgaaacaaattcattgattaaaaagtttacatttagaaatgtgaaaatcaccgatgaaagtttgtttcaggttatgaaacttttgaatcagatttctggattgttagaattagagtttgatgactgtacccttaatggagttggtaattttagagcatctgataatgacagagttatagatccaggtaaagtggaaacgttaacaatccggaggctgcatattccaaggttttacttattttatgatctgagcactttatattcacttacagaaagagttaaaagaatcacagtagaaaacagtaaagtttttctggttccttgtttactttcacaacatttaaaatcattagaatacttggatctcagtgaaaatttgatggttgaagaatacttgaaaaattcagcctgtgaggatgcctggccctctctacaaactttaattttaaggcaaaatcatttggcatcattggaaaaaaccggagagactttgctcactctgaaaaacttgactaacattgatatcagtaagaatagttttcattctatgcctgaaacttgtcagtggccagaaaagatgaaatatttgaacttatccagcacacgaatacacagtgtaacaggctgcattcccaagacactggaaattttagatgttagcaacaacaatctcaatttattttctttgaatttgccgcaactcaaagaactttatatttccagaaataagttgatgactctaccagatgcctccctcttacccatgttactagtattgaaaatcagtaggaatgcaataactacgttttctaaggagcaacttgactcatttcacacactgaagactttggaagctggtggcaataacttcatttgctcctgtgaattcctctccttcactcaggagcagcaagcactggccaaagtcttgattgattggccagcaaattacctgtgtgactctccatcccatgtgcgtggccagcaggttcaggatgtccgcctctcggtgtcggaatgtcacaggacagcactggtgtctggcatgtgctgtgctctgttcctgctgatcctgctcacgggggtcctgtgccaccgtttccatggcctgtggtatatgaaaatgatgtgggcctggctccaggccaaaaggaagcccaggaaagctcccagcaggaacatctgctatgatgcatttgtttcttacagtgagcgggatgcctactgggtggagaaccttatggtccaggagctggagaacttcaatccccccttcaagttgtgtcttcataagcgggacttcattcctggcaagtggatcattgacaatatcattgactccattgaaaagagccacaaaactgtctttgtgctttctgaaaactttgtgaagagtgagtggtgcaagtatgaactggacttctcccatttccgtctttttgatgagaacaatgatgctgccattctcattcttctggagcccattgagaaaaaagccattccccagcgcttctgcaagctgcggaagataatgaacaccaagacctacctggagtggcccatggacgaggctcagcgggaaggattttgggtaaatctgagagctgcgataaagtcctaggttcccatatttaagaccagtctttgtctagttgggatctttatgtcactagttatagttaagttcattcagacataattatataaaaactacgtggatgtaccgtcatttgaggacttgcttactaaaactacaaaacttcaaattttgtctggggtgctgttttataaacatatgccagatttaaaaattggtttttggtttttcttttttctatgagataaccatgatcataagtctattactgatatctgaatatagtcccttggtatccaagggaattggttgcaggatcctcgtggatatcaaaattcatagatgatcaagtcccttataagagtggcatagtatttgcatataacctgtgtacattctcctgtatactttaaatcatctctagattacttatgatacccaatacaatgtaaatactatgtaaatagttgtactgtctttttatttatattattattgttattttttattttcaaaatttttaaaacatacttttgatccacagttggttgacttcatggatgcagaacccatggatatagagggccaactgtaatctgtagcaactggcttagttcattaggaaacagcacaaatgaacttaagattctcaatgactgtgtcattctttcttcctgctaagagactcctctgtggccacaaaaggcattctctgtcctacctagctgtcacttctctgtgcagctgatctcaagagcaacaaggcaaagtatttggggcactccccaaaacttgttgctattcctagaaaaaagtgctgtgtatttcctattaaactttacaggatgagaaaaaaaaaaaaaaaaa

SEQ ID NO: 579 - DNA, 4992 bp, Homo sapiens
gaagactccagatataggatcactccatgccatcaagaaagttgatgctattgggcccatctcaagctgatcttggcacctctcatgctctgctctcttcaaccagacctctacattccattttggaagaagactaaaaatggtgtttccaatgtggacactgaagagacaaattcttatcctttttaacataatcctaatttccaaactccttggggctagatggtttcctaaaactctgccctgtgatgtcactctggatgttccaaagaaccatgtgatcgtggactgcacagacaagcatttgacagaaattcctggaggtattcccacgaacaccacgaacctcaccctcaccattaaccacataccagacatctccccagcgtcctttcacagactggaccatctggtagagatcgatttcagatgcaactgtgtacctattccactggggtcaaaaaacaacatgtgcatcaagaggctgcagattaaacccagaagctttagtggactcacttatttaaaatccctttacctggatggaaaccagctactagagataccgcagggcctcccgcctagcttacagcttctcagccttgaggccaacaacatcttttccatcagaaaagagaatctaacagaactggccaacatagaaatactctacctgggccaaaactgttattatcgaaatccttgttatgtttcatattcaatagagaaagatgccttcctaaacttgacaaagttaaaagtgctctccctgaaagataacaatgtcacagccgtccctactgttttgccatctactttaacagaactatatctctacaacaacatgattgcaaaaatccaagaagatgattttaataacctcaaccaattacaaattcttgacctaagtggaaattgccctcgttgttataatgccccatttccttgtgcgccgtgtaaaaataattctcccctacagatccctgtaaatgcttttgatgcgctgacagaattaaaagttttacgtctacacagtaactctcttcagcatgtgcccccaagatggtttaagaacatcaacaaactccaggaactggatctgtcccaaaacttcttggccaaagaaattggggatgctaaatttctgcattttctccccagcctcatccaattggatctgtctttcaattttgaacttcaggtctatcgtgcatctatgaatctatcacaagcattttcttcactgaaaagcctgaaaattctgcggatcagaggatatgtctttaaagagttgaaaagctttaacctctcgccattacataatcttcaaaatcttgaagttcttgatcttggcactaactttataaaaattgctaacctcagcatgtttaaacaatttaaaagactgaaagtcatagatctttcagtgaataaaatatcaccttcaggagattcaagtgaagttggcttctgctcaaatgccagaacttctgtagaaagttatgaaccccaggtcctggaacaattacattatttcagatatgataagtatgcaaggagttgcagattcaaaaacaaagaggcttctttcatgtctgttaatgaaagctgctacaagtatgggcagaccttggatctaagtaaaaatagtatattttttgtcaagtcctctgattttcagcatctttctttcctcaaatgcctgaatctgtcaggaaatctcattagccaaactcttaatggcagtgaattccaacctttagcagagctgagatatttggacttctccaacaaccggcttgatttactccattcaacagcatttgaagagcttcacaaactggaagttctggatataagcagtaatagccattattttcaatcagaaggaattactcatatgctaaactttaccaagaacctaaaggttctgcagaaactgatgatgaacgacaatgacatctcttcctccaccagcaggaccatggagagtgagtctcttagaactctggaattcagaggaaatcacttagatgttttatggagagaaggtgataacagatacttacaattattcaagaatctgctaaaattagaggaattagacatctctaaaaattccctaagtttcttgccttctggagtttttgatggtatgcctccaaatctaaagaatctctctttggccaaaaatgggctcaaatctttcagttggaagaaactccagtgtctaaagaacctggaaactttggacctcagccacaaccaactgaccactgtccctgagagattatccaactgttccagaagcctcaagaatctgattcttaagaataatcaaatcaggagtctgacgaagtattttctacaagatgccttccagttgcgatatctggatctcagctcaaataaaatccagatgatccaaaagaccagcttcccagaaaatgtcctcaacaatctgaagatgttgcttttgcatcataatcggtttctgtgcacctgtgatgctgtgtggtttgtctggtgggttaaccatacggaggtgactattccttacctggccacagatgtgacttgtgtggggccaggagcacacaagggccaaagtgtgatctccctggatctgtacacctgtgagttagatctgactaacctgattctgttctcactttccatatctgtatctctctttctcatggtgatgatgacagcaagtcacctctatttctgggatgtgtggtatatttaccatttctgtaaggccaagataaaggggtatcagcgtctaatatcaccagactgttgctatgatgcttttattgtgtatgacactaaagacccagctgtgaccgagtgggttttggctgagctggtggccaaactggaagacccaagagagaaacattttaatttatgtctcgaggaaagggactggttaccagggcagccagttctggaaaacctttcccagagcatacagcttagcaaaaagacagtgtttgtgatgacagacaagtatgcaaagactgaaaattttaagatagcattttacttgtcccatcagaggctcatggatgaaaaagttgatgtgattatcttgatatttcttgagaagccctttcagaagtccaagttcctccagctccggaaaaggctctgtgggagttctgtccttgagtggccaacaaacccgcaagctcacccatacttctggcagtgtctaaagaacgccctggccacagacaatcatgtggcctatagtcaggtgttcaaggaaacggtctagcccttctttgcaaaacacaactgcctagtttaccaaggagaggcctggctgtttaaattgttttcatatatatcacaccaaaagcgtgttttgaaattcttcaagaaatgagattgcccatatttcaggggagccaccaacgtctgtcacaggagttggaaagatggggtttatataatgcatcaagtcttctttcttatctctctgtgtctctatttgcacttgagtctctcacctcagctcctgtaaaagagtggcaagtaaaaaacatggggctctgattctcctgtaattgtgataattaaatatacacacaatcatgacattgagaagaactgcatttctacccttaaaaagtactggtatatacagaaatagggttaaaaaaaactcaagctctctctatatgagaccaaaatgtactagagttagtttagtgaaataaaaaaccagtcagctggccgggcatggtggctcatgcttgtaatcccagcactttgggaggccgaggcaggtggatcacgaggtcaggagtttgagaccagtctggccaacatggtgaaaccccgtctgtactaaaaatacaaaaattagctgggcgtggtggtgggtgcctgtaatcccagctacttgggaggctgaggcaggagaatcgcttgaacccgggaggtggaggtggcagtgagccgagatcacgccactgcaatgcagcccgggcaacagagctagactgtctcaaaagaacaaaaaaaaaaaaacacaaaaaaactcagtcagcttcttaaccaattgcttccgtgtcatccagggccccattctgtgcagattgagtgtgggcaccacacaggtggttgctgcttcagtgcttcctgctctttttccttgggcctgcttctgggttccatagggaaacagtaagaaagaaagacacatccttaccataaatgcatatggtccacctacaaatagaaaaatatttaaatgatctgcctttatacaaagtgatattctctacctttgataatttacctgcttaaatgtttttatctgcactgcaaagtactgtatccaaagtaaaatttcctcatccaatatctttcaaactgttttgttaactaatgccatatatttgtaagtatctgcacacttgatacagcaacgttagatggttttgatggtaaaccctaaaggaggactccaagagtgtgtatttatttatagttttatcagagatgacaattatttgaatgccaattatatggattcctttcattttttgctggaggatgggagaagaaaccaaagtttatagaccttcacattgagaaagcttcagttttgaacttcagctatcagattcaaaaacaacagaaagaaccaagacattcttaagatgcctgtactttcagctgggtataaattcatgagttcaaagattgaaacctgaccaatttgctttatttcatggaagaagtgatctacaaaggtgtttgtgccatttggaaaacagcgtgcatgtgttcaagccttagattggcgatgtcgtattttcctcacgtgtggcaatgccaaaggctttactttacctgtgagtacacactatatgaattatttccaacgtacatttaatcaataagggtcacaaattcccaaatcaatctctggaataaatagagaggtaattaaattgctggagccaacta

SEQ ID NO: 580 - DNA, 4197 bp, Homo sapiens
ctcctgcatagagggtaccattctgcgctgctgcaagttacggaatgaaaaattagaacaacagaaacatggaaaacatgttccttcagtcgtcaatgctgacctgcattttcctgctaatatctggttcctgtgagttatgcgccgaagaaaatttttctagaagctatccttgtgatgagaaaaagcaaaatgactcagttattgcagagtgcagcaatcgtcgactacaggaagttccccaaacggtgggcaaatatgtgacagaactagacctgtctgataatttcatcacacacataacgaatgaatcatttcaagggctgcaaaatctcactaaaataaatctaaaccacaaccccaatgtacagcaccagaacggaaatcccggtatacaatcaaatggcttgaatatcacagacggggcattcctcaacctaaaaaacctaagggagttactgcttgaagacaaccagttaccccaaataccctctggtttgccagagtctttgacagaacttagtctaattcaaaacaatatatacaacataactaaagagggcatttcaagacttataaacttgaaaaatctctatttggcctggaactgctattttaacaaagtttgcgagaaaactaacatagaagatggagtatttgaaacgctgacaaatttggagttgctatcactatctttcaattctctttcacacgtgccacccaaactgccaagctccctacgcaaactttttctgagcaacacccagatcaaatacattagtgaagaagatttcaagggattgataaatttaacattactagatttaagcgggaactgtccgaggtgcttcaatgccccatttccatgcgtgccttgtgatggtggtgcttcaattaatatagatcgttttgcttttcaaaacttgacccaacttcgatacctaaacctctctagcacttccctcaggaagattaatgctgcctggtttaaaaatatgcctcatctgaaggtgctggatcttgaattcaactatttagtgggagaaatagcctctggggcatttttaacgatgctgccccgcttagaaatacttgacttgtcttttaactatataaaggggagttatccacagcatattaatatttccagaaacttctctaaacttttgtctctacgggcattgcatttaagaggttatgtgttccaggaactcagagaagatgatttccagcccctgatgcagcttccaaacttatcgactatcaacttgggtattaattttattaagcaaatcgatttcaaacttttccaaaatttctccaatctggaaattatttacttgtcagaaaacagaatatcaccgttggtaaaagatacccggcagagttatgcaaatagttcctcttttcaacgtcatatccggaaacgacgctcaacagattttgagtttgacccacattcgaacttttatcatttcacccgtcctttaataaagccacaatgtgctgcttatggaaaagccttagatttaagcctcaacagtattttcttcattgggccaaaccaatttgaaaatcttcctgacattgcctgtttaaatctgtctgcaaatagcaatgctcaagtgttaagtggaactgaattttcagccattcctcatgtcaaatatttggatttgacaaacaatagactagactttgataatgctagtgctcttactgaattgtccgacttggaagttctagatctcagctataattcacactatttcagaatagcaggcgtaacacatcatctagaatttattcaaaatttcacaaatctaaaagttttaaacttgagccacaacaacatttatactttaacagataagtataacctggaaagcaagtccctggtagaattagttttcagtggcaatcgccttgacattttgtggaatgatgatgacaacaggtatatctccattttcaaaggtctcaagaatctgacacgtctggatttatcccttaataggctgaagcacatcccaaatgaagcattccttaatttgccagcgagtctcactgaactacatataaatgataatatgttaaagttttttaactggacattactccagcagtttcctcgtctcgagttgcttgacttacgtggaaacaaactactctttttaactgatagcctatctgactttacatcttcccttcggacactgctgctgagtcataacaggatttcccacctaccctctggctttctttctgaagtcagtagtctgaagcacctcgatttaagttccaatctgctaaaaacaatcaacaaatccgcacttgaaactaagaccaccaccaaattatctatgttggaactacacggaaacccctttgaatgcacctgtgacattggagatttccgaagatggatggatgaacatctgaatgtcaaaattcccagactggtagatgtcatttgtgccagtcctggggatcaaagagggaagagtattgtgagtctggagctaacaacttgtgtttcagatgtcactgcagtgatattatttttcttcacgttctttatcaccaccatggttatgttggctgccctggctcaccatttgttttactgggatgtttggtttatatataatgtgtgtttagctaaggtaaaaggctacaggtctctttccacatcccaaactttctatgatgcttacatttcttatgacaccaaagatgcctctgttactgactgggtgataaatgagctgcgctaccaccttgaagagagccgagacaaaaacgttctcctttgtctagaggagagggattgggatccgggattggccatcatcgacaacctcatgcagagcatcaaccaaagcaagaaaacagtatttgttttaaccaaaaaatatgcaaaaagctggaactttaaaacagctttttacttggctttgcagaggctaatggatgagaacatggatgtgattatatttatcctgctggagccagtgttacagcattctcagtatttgaggctacggcagcggatctgtaagagctccatcctccagtggcctgacaacccgaaggcagaaggcttgttttggcaaactctgagaaatgtggtcttgactgaaaatgattcacggtataacaatatgtatgtcgattccattaagcaatactaactgacgttaagtcatgatttcgcgccataataaagatgcaaaggaatgacatttctgtattagttatctattgctatgtaacaaattatcccaaaacttagtggtttaaaacaacacatttgctggcccacagtttttgagggtcaggagtccaggcccagcataactgggtcctctgctcagggtgtctcagaggctgcaatgtaggtgttcaccagagacataggcatcactggggtcacactcatgtggttgttttctggattcaattcctcctgggctattggccaaaggctatactcatgtaagccatgcgagcctctcccacaaggcagcttgcttcatcagagctagcaaaaaagagaggttgctagcaagatgaagtcacaatcttttgtaatcgaatcaaaaaagtgatatctcatcactttggccatattctatttgttagaagtaaaccacaggtcccaccagctccatgggagtgaccacctcagtccagggaaaacagctgaagaccaagatggtgagctctgattgcttcagttggtcatcaactattttcccttgactgctgtcctgggatggcctgctatcttgatgatagattgtgaatatcaggaggcagggatcactgtggaccatcttagcagttgacctaacacatcttcttttcaatatctaagaacttttgccactgtgactaatggtcctaatattaagctgttgtttatatttatcatatatctatggctacatggttatattatgctgtggttgcgttcggttttatttacagttgcttttacaaatatttgctgtaacatttgacttctaaggtttagatgccatttaagaactgagatggatagcttttaaagcatcttttacttcttaccattttttaaaagtatgcagctaaattcgaagcttttggtctatattgttaattgccattgctgtaaatcttaaaatgaatgaataaaaatgtttcattttacaa

SEQ ID NO: 581 - DNA, 2307 bp, Homo sapiens
agccactttgacaacgtttctgagccaggggtgaccatgacctgctgcgaaggatggacatcctgcaatggattcagcctgctggttctactgctgttaggagtagttctcaatgtgatacctctaattgtcagcttagttgaggaagaccaattttctcaaaaccccatctcttgctttgagtggtggttcccaggaattataggagcaggtctgatggccattccagcaacaacaatgtccttgacagcaagaaaaagagcgtgctgcaacaacagaactggaatgtttctttcatcacttttcagtgtgatcacagtcattggtgctctgtattgcatgctgatatccatccaggctctcttaaaaggtcctctcatgtgtaattctccaagcaacagtaatgccaattgtgaattttcattgaaaaacatcagtgacattcatccagaatccttcaacttgcagtggtttttcaatgactcttgtgcacctcctactggtttcaataaacccaccagtaacgacaccatggcgagtggctggagagcatctagtttccacttcgattctgaagaaaacaaacataggcttatccacttctcagtatttttaggtctattgcttgttggaattctggaggtcctgtttgggctcagtcagatagtcatcggtttccttggctgtctgtgtggagtctctaagcgaagaagtcaaattgtgtagtttaatgggaataaaatgtaagtatcagtagtttgaattaatttgagaagtacacttgttttcaaagtcatctttgagatgatttaaaaaatcaacccttcacgtagaaagcacgttgtaaatgcataacactctcatatcagtggttgatttgggaaaggtggagagaattttcaattagttttgtgttgtactattcaaattttttacctcttcactgtgtgtagagaaaggagaagggaaggaggatgagaaggaacggaagtcatcctgaaaataaaagtacaggactttttttttttttttttgagacagggtctcaaaaaaggctggagtacagtagtacagtggtgctatctcagcttactgcagcctcaacctcctgggctcaggtgattctcccatctcagcctccctagtagctgggactacaggtgcgtgccactatgccaagctaatttttgtatttttagtagagatgggggttttccatattgcccaggctggtcccgaactcatggactcaagtgatctgcctgcctcagcctcctaaagtgctgcgattacaggcatgagccatcgcgcctaaaggacaggacctttttattgtatttctttaaagaataaatacataacctgaatgcaatcaagtctttagatctaattctcagcttgcagggaacactaggacaaatccaaaaagtgggtcagcgggcacagaatggcccaattttcaacaggaaaatgttataaaagaaaaatatttttgagggaactgttatagattaagagaatagaggcatgtttcagctaaacacatgtaaactttgtcagagataattgggaggagtatgtagaagaatcggattattgttaattttggtaggtctgataatggttttatagtataaaggctgagtaccccttatccaaaatgattaagatcagaagtgttttggctttcacatttttttggattttggaattttgcctataataatgagacatcttggggatgggatgcaagtctaaccacaaaattcatttatgtctcatacacactttgaacacctggcctgaaggtaatttcacacaatattttaaataactttgtgcatgaaacacaattttgactgcattttgactgcaactcatcacatgaggtcaggtatggaattttccacttgtggtgttacgttactggctcaaaaagttttggatctcggagcattctggattttgaatttttggattagtgatgctcaacctgtatacagaaatgtcctcatttttaaaaaaagaaatgcatatttatatgttttaaaattacttcaaccaaaagcaacggggagatgtttactgttatatttaggtgacaggtacatggcaattcattataccctcctattttcctatgtttacattattcattaattaaaaaacaatacctagaaaaacccaagactttcaaaagctattttctatatgtgccaatctttaaaaaacaggataacaagggtatttatcacattaaaatgttgtaaaacagcaaagctaaaatctaaaaaaaaaaaaaaaaaa

SEQ ID NO: 582 - DNA, 3102 bp, Homo sapiens
ttaaagggggcagtgactgcggctgggcgggagtccgggtcggcttggctgagcgggggcggtgctgggcagggcggcggccgctccctcccggactcccggcctcccggcctccctggtcccgcctgggaagggatgcaaggaagccctccggcgctgcgctccgaggcgggagacagcgtccccctccgcccctcgggtcctggcgcctcagagcccggcccaggccgcggaacggtgatgctcgggccggacgggcgggcgcggatccctgcgtcccgctgaaaatgtgtgtctgacatgcaagctcagtggggcagagacccgtggattgctgtgccctgccctccggacctggatcatgaaggtgttgggaagaagcttcttctgggtgctgtttcccgtccttccctgggcggtgcaggctgtggagcacgaggaggtggcgcagcgtgtgatcaaactgcaccgcgggcgaggggtggctgccatgcagagccggcagtgggtccgggacagctgcaggaagctctcagggcttctccgccagaagaatgcagttctgaacaaactgaaaactgcaattggagcagtggagaaagacgtgggcctgtcggatgaagagaaactgtttcaggtgcacacgtttgaaattttccagaaagagctgaatgaaagtgaaaattccgttttccaagctgtctacggactgcagagagccctgcagggggattacaaagatgtcgtgaacatgaaggagagcagccggcagcgcctggaggccctgagagaggctgcaataaaggaagaaacagaatatatggaacttctggcagcagaaaaacatcaagttgaagcccttaaaaatatgcaacatcaaaaccaaagtttatccatgcttgacgagattcttgaagatgtaagaaaggcagcggatcgtctggaggaagagatagaggaacatgcttttgacgacaataaatcagtcaagggggtcaattttgaggcagttctgagggtggaggaagaagaggccaattctaagcaaaatataacaaaacgagaagtggaggatgacttgggtcttagcatgctgattgactcccagaacaaccagtatattttgaccaagcccagagattcaaccatcccacgtgcagatcaccactttataaaggacattgttaccataggaatgctgtccttgccttgtggctggctatgtacagccataggattgcctacaatgtttggttatattatttgtggtgtacttctgggaccttcaggactaaatagtattaagtctattgtgcaagtggagacattaggagaatttggggtgttttttactctttttcttgttggcttagaattttctccagaaaagctaagaaaggtgtggaagatttccttacaagggccgtgttacatgacactgttaatgattgcatttggcttgctgtgggggcatctcttgcggatcaaacccacgcagagcgtcttcatttccacgtgtctgtccttgtcaagcacacccctcgtgtccaggttcctcatgggcagtgctcggggtgacaaagaaggcgacattgactacagcaccgtgctcctcggcatgctggtgacgcaggacgtgcagctcgggctcttcatggccgtcatgccgactctcatacaggcgggcgccagtgcatcttctagcattgtcgtggaagttctccgaatcctggttttgattggtcagattcttttttcactagcggcggtttttcttttatgtcttgttataaagaagtatctcattggaccctattatcggaagctgcacatggaaagcaaggggaacaaagaaatcctgatcttgggaatatctgcctttatcttcttaatgttaacggtcacggagctgctggacgtctccatggagctgggctgtttcctggctggagcgctcgtctcctctcagggccccgtggtcaccgaggagatcgccacctccatcgaacccatccgcgacttcctggccatcgttttcttcgcctccatagggctccacgtgttccccacgtttgtggcgtacgagctcacggtgctggtgttcctcaccttgtcagtggtggtgatgaagtttctcctggcggcgctggtcctgtctctcattctgccgaggagcagccagtacatcaagtggatcgtctctgcggggcttgcccaggtcagcgagttttcctttgtcctggggagccgggcgcgaagagcgggcgtcatctctcgggaggtgtacctccttatactgagtgtgaccacgctcagcctcttgctcgccccggtgctgtggagagctgcaatcacgaggtgtgtgcccagaccggagagacggtccagcctctgatggctcggagatgatggaccgtggaagggaagcgtctgtggggagtgagcgcttagatggccagcagctgctccttctgggaagctcgcaccttggcaacagaacagccctctagcagagcgtcagtgcagtcgtgttatcccggcttttacagaatattcttgtcctattttagaattttccggagtagtttatttgcagtctgttgattatgtgcagtagacccgggacactgcgttttaccgatcaccttgaatgtggtgcctggatgtgccttttttttttttccctgaaattattattaattttctattgtgagttcatcagttcatagtttttttagtaaagaagcaaaattaaaaggcttttaaaaatgtacaacttcagaattataatctgttagtcaaatatttgttattaaacatttctgtaatatgaagttgtaatcctggccgtgagcttggaagcttacttttgattcttaaagcctatgttttctaaaatgagacaaatacggatgtctatttgccttttattgtaacttttaaatgaaataatttcatgtcaatttctattagatatatcacttaaaatatttggttttaaatcacaagaatatgtattctttaataaagataatttatgatcatggtataattaattgaaatttattaaaatctgtttttattaaaaaaaaaaaaaaaaaa

SEQ ID NO: 583 - DNA, 936 bp, Homo sapiens
agttcacctgcagaggaggctccagaaagcggcatgtcccctttgctctttggggctgggctggtcgttctgaatctagtgacgtctgccaggagccagaagacagaacctctaagtggctctggggaccagccactcttccgtggagctgatcgatatgactttgccatcatgatacctccaggaggcacggaatgcttttggcaatttgcccaccagactggatacttctatttcagttgcgaggttcagcggacagtggggatgtcacatgaccggcatgttgctgccacggcacataacccacagggatttctcatagacacctcccagggtgttcggggccagattaacttctctacccaagagacaggtttttatcagctttgtctaagtaatcagcataatcacttcggttctgtgcaagtgtacctcaactttggggtcttctatgaggggcctgagactgatcacaaacagaaggaaagaaaacaactgaatgatactctggatgcaattgaggacggcacacaaaaggtgcagaacaatatctttcacatgtggcgatactacaactttgcccggatgaggaaaatggctgactttttccttatccaatcaaactataactacgtgaactggtggtcgacagcccagagccttgttattattctttctgggatcctgcaactgtatttcttgaagcgtctcttcaatgttccaacaactacagatacaaagaagccaagatgctaagctaaggtgactatagcaccctggctgttttcttctggggcttagtcgaatcagctttgtaatgttatgggacaaaaatcaattatctcattaatgttttagtctgctgcacacatctaaaaaagcaaaatggcaataaaatcataacagcaaaaaaaaaaaaaaaaaaaaaaaaaaaaa

SEQ ID NO: 584 - DNA, 1876 bp, Homo sapiens
ggggaatcctgctctgggatagcacccggccccgcagagcagcgcggcagcccaagggccccggcgccgggggcggcggggaaccccaaacgcaaccgggtctggagggatccccgcgccgagccagccgccgtcaccgcctccgcgccgcccctgcgggcttggcaggcgcccggcgcgcccgcactgcgcccggccgccggctcccgcggtcccaccgtgagctcgccggcccgtcgcccgctcgccatgcaaccgccgccggcctcgcgcgcgtaggcgcccgccgcaggccatgctgcccctgctcgccgcgctcctggccgccgcctgcccgctgccgcccgtccgcggcggggccgcggacgcgcccggcctcctcggggtgccctccaatgcttcagtcaacgcgtcctccgcggacgagcccatcgccccgcggctgctggcctcggcggcccccgggccccccgagcgcccgggcccggaggaggcggcggcggcggcggcgccgtgcaacatcagcgtgcagcggcagatgctgagctcgctgctcgtgcgctggggccgcccgcggggcttccagtgcgacctactgctcttctccaccaacgcgcacggccgcgctttcttcgccgccgccttccaccgcgtcgggccgccgctgctcatcgagcacctggggctggcggcgggcggcgcgcagcaggacctgcgcctctgcgtgggctgcggctgggtgcgcggtcgccgcaccggccgcctccggcccgccgccgcccccagcgccgccgccgccaccgccggggcgcccaccgcgctgccagcctaccccgcggccgagccgcccgggccgctgtggctgcagggcgagccgctgcatttctgctgcctagacttcagcctggaggagctgcagggcgagccgggctggcggctgaaccgtaagcccattgagtccacgctggtggcctgcttcatgaccctggtcatcgtggtgtggagcgtggccgccctcatctggccggtgcccatcatcgccggcttcctgcccaacggcatggaacagcgccggaccaccgccagcaccaccgcagccacccccgccgcagtgcccgcagggaccaccgcagccgccgccgccgccgccgctgccgccgccgccgcggccgtcacttcgggggtggcgaccaagtgacccgctccgctcctccctgtgtccgtcctgtgtccgcgcgcgcgggtgcctttcccgccggagactcggccggtgtgcttcgtgctgtagttatcgttagttcctcttcccgagatggggccgccgagagaccccagcgcctttgaaaagcaaggtttgtgctgcgcttccagttccgaaaagcagatgtttaagcccttggactgagggtgggatcgcagctccgaagacggagaggagggaaatggggccctttcccctctattgcatccccctgcccgactccttccccgcacccacgtgccctagattcatggcagaaaatgaccaaatcctgtgtatttgttttatatatttaataactgttttaaatgaaagttttagtaaaaaaaatacaaaacaaaaagattaaattgctattgctgtagtaagagaagctctttgtatctgaacatagttgtatttgaaatttgtggttttttaatttatttaaaattggggggagggcatgggaaggatttaacaccgatatattgttaccgctgaaaatgaactttatgaaccttttccaagttgatctatccagtgacgtggcctggtgggcgtttcttcttgtacttatgtggttttttggcttttaatacagacattttcctccagaaaaaaaaaaaaaaaaaa

SEQ ID NO: 585 - DNA, 5987 bp, Homo sapiens
gagaggcgtcctccggctctgggctccggtcggtgggtgcctcggctcggctttccccggcgctggctgggctcagcggcccctgagcccaagcgacacacgccccgcggtccccgatccggcccctgggagagccgcgccgttctggaacccgggagcccccaacttcgcgccaagttcggagccgccttctgagggagacatgaaaaagatgagcaggaatgttttgctacaaatggaggaggaggaggacgacgacgatggggatatcgtgttggaaaaccttggacagacaattgtccccgatttgggatcactggaaagtcagcatgattttcgaaccccggagtttgaagaatttaatggaaaacctgactccctcttttttaatgatggccagcgaagaattgactttgttctagtatatgaggatgaaagcagaaaagagaccaataaaaagggtacaaatgaaaaacaaaggaggaaaagacaagcatacgaatctaaccttatctgtcatggcctgcagttagaagcaacaagatcagtattggatgacaagcttgtatttgtaaaagtacacgcaccatgggaggtgttatgtacgtatgctgagataatgcacatcaaattgcctctgaaacccaatgatctgaaaaaccggtcctcagcctttggtacactcaactggtttaccaaagtcctcagtgtagacgaaagcatcatcaagccagagcaagagtttttcactgccccatttgagaagaaccggatgaatgatttttacatagttgatagagatgctttcttcaatccagccaccagaagccgcattgtttacttcatcctctctcgggtcaagtatcaagtgataaacaatgttagcaagtttgggatcaacagacttgtaaactctgggatctacaaggcagctttcccactccatgattgcaaattccgccgtcagtcagaggatcccagctgccctaatgaacggtaccttctgtacagagaatgggctcatcctcgaagcatatacaaaaagcagcccttggatcttatcaggaaatactatggagagaagattggaatctactttgcttggctgggctattacactcagatgcttctcctggccgcagttgtaggagtggcttgctttctctatggatatcttaatcaagataactgtacatggagcaaagaagtttgtcatcctgatattggtggcaagatcataatgtgtcctcagtgtgataggctttgtccattctggaaactcaatattacttgcgagtcctcaaagaaattgtgcatcttcgacagttttggaaccctggtctttgcagtatttatgggagtatgggttaccttgtttttggagttttggaagcgacgccaggcagaacttgagtatgaatgggatactgttgagttacagcaggaagaacaagcccgaccagaatacgaagcacgatgtactcacgtagtgataaatgagattactcaggaagaagaacgcattccctttactgcctggggaaaatgtatacggataaccctctgtgccagtgctgtctttttctggatcctattgatcatcgcttcagttattgggatcattgtctataggctctcggtgttcattgtattttctgcaaaacttcccaagaacattaatggaacagacccaatccagaaatacctgactccacagacagccacgtccatcacggcctccatcatcagctttataattatcatgattctgaacaccatatatgaaaaagtggcaattatgattactaacttcgaactcccaaggacccagactgattatgagaacagcctcaccatgaagatgttcttattccagtttgtcaactactactcttcatgcttctacatagcattctttaagggcaaatttgtaggctatccaggagacccagtttattggttgggaaaatacagaaatgaagagtgtgacccaggtggctgtcttcttgaactgacaactcagctgacaataatcatgggaggaaaagcaatctggaataacatacaagaagtattattgccctggatcatgaatctaattgggcgatttcacagagtttctggatcagaaaagataaccccacgatgggaacaggactaccatctgcagcctatgggcaaactgggattattttatgaatatcttgaaatgattattcagtttgggttcgtcaccttatttgtggcctcttttccactggcccctctgttggctctcgtgaacaatatattggaaataagagtggacgcatggaaactgaccacccagtttagacgcctggtaccagagaaagcccaagacattggagcatggcagcccatcatgcaaggaatagcaattctggctgtggtgaccaatgccatgatcatagctttcacgtcggacatgatcccccgcctagtgtactactggtccttctccgtccctccctacggggaccacacttcctacaccatggaagggtacatcaacaacactctctccatcttcaaagtcgcagacttcaaaaacaaaagcaagggaaacccgtactctgacctgggtaaccataccacatgcaggtatcgtgatttccgatacccacctggacacccccaggagtataaacacaacatctactattggcatgtgattgcagccaagctggctcttatcattgtcatggagcacgtcatctactctgtgaaatttttcatttcatatgcaattcccgatgtatcaaaacgcacaaagagcaagatccagagagaaaaatacctaacccaaaagcttcttcatgagaatcacctcaaagatatgacgaaaaatatgggggtgatagctgagcggatgatagaagcagtagataacaatttacggccaaaatcagaataagagctttatgttctgagaagcactttaaggaatttagctttgtcaaaatatattaggaatcactaatgagaatgtgtaagttaaatcactttggcaaatatgagtctcaactattgccatttcctcatgtattatttttcagtttcagctagcgatgcagaaactggaaaatgtaaaacttagatcatgaagggcataaaacttatcacccggaaaacctcaatgttacctttttctgataaattggaattttacagaaaaagtccctcagtgtgcttaaaaaccaccccttctaaagtagaatggattcttttttttctgtttgattattttcatttctgtctattctcaggcgcatgatctcctttatttttaagccatgtttcatttcttcacttggctagatctgttccagggtcatcttttccttacagtaccatcattatagatttaatttaatagctttcatgtgattaaaaatagctaactagactcaaggattcacaatatttaggtgtattttcaatacctccagaaaggaaacctcagttaatcagaggaaatagtttcagtcttcatttgagcatgtctttccatctcaaaaaaatactcttagtaggttggagtgaagatagcaaggttttgaagcatatttgtcctaatccacagtgacactttttatcttccaggagcactcctaggaggttccgtgcctaatcaatgttgactgctttgcagatctcaagggaataaaatgacaaaagcagggaaagttacagattcaaacagcattttaactcatgttgatctggataattaatcttttctaaagatgtgtagtttcttggaaaacagtgatatcacatgattaaaattacatttttatcaacataattgtctggaaaagataagcccctcaattttctaccagttgacttttattcattagatacagaaggtgcagtattacacatcaccagctgcctttgtgaatggctcactacacagccattggggtacaactgtgtgcatgggcagaaacagcaagtgccctcattgtggtcattgggtggggagtgccttttgtcaaggagtctgcaggaattggcttatttctgtatgccaaagtgatcaacacaccaaagtctctgccataaagaatgtggcttccttgcatcctccatcctgttactctgggcccagtaatttgatgtaactgtctgattgtactagagacaggagtatacccagcttattcataatcaagtaaagagactcagattagatttgattttttagcctcctctagagccaatcaggcagttaagagtaataaaggaaaagggtttggtcacaaaccctaccattatctggagattacttcctgctgcactcctgtcttgccatgcacgtcttgccccctcacttttgctcagcctagcagtctacttcactttattgccttgtaagtgtcaggcctcctgggcgctctggaaaagacagggagccaggccctctcacccctactggtaacaggtcattgctgggtgcacaagagggaggtgatttgcatcatggtcatgctgcatgggcttcactgggatgctgttaaacaccagaggagccaacctatcagaatcccagcagcaaaggaaaactcagattttagaggctttttacaataaagtagcgtaactctaggtcatgattgatttcaaatgcctgccatgaatgatttgtaagtaattatgtaggatccatcaaagcagtattgtaggcttttgaattgtcccagtggatccgggaccccatttcactgtctctcttgatcgtgttaatgatgcaatcagagttcaagacaggccccatgaagtctgactgcactgggatggagaaatgaatttcttcccactgaaggaaactctttctcattcgcagccaagacgggagtgccactgttcctctcttcactcctgagatactgcttctggaagcgggtgtcacttcctctctagtacctcttctcttctctgaagtgtgtgactatctcctagtgtttaaatttggcagttactcgccatgtatgtcagcatagaaaaggaaatgtttttaccttatctcctgtatgtatgatagaacttaaaagaaatgtgcatttgttttcatagccccagcagagaaaatcctcttcatagattaaatgtgctgctgtggacaggagggaaaaaaaaaccctctacatattgaaaggcaccaaatgtaatatctgacactgttaagatgcccaaaagagcaaagttgtagtggagatgcagggtcatttccccatgccatccacagtgtttgttagtgagtccacggctgacttgcagtgataaagaaaagcatggagctgtgtctgcagacaatggtggctgcatctgtaagtggcttcagaggcagcagccctggggaaattgatgggtgtggcagtggacctgtgaagagggagaatctagccttcagcctgtccagtgttaaccactagagaaactgagctttatatccttttttaatgcctgtgaattttagcatattgaaacattagagcaaatactcaggggatttttcattaaacatccctcagataatttagctatatatcattagaaagggaaagctatcatttttattttaaaactaaacaaggccatcttataaactgtcaccaaagtcttcccttttttattgcatgtgtgccttgaatttcataaaacattaattcacaatgggggtcagaatgtactcttgttgaaacacttcttgtaccattttatgttcatattatgtttgagagggtaaaaatgtatgagcagcttaactgaagtagaactattcatgatgcttttcacacattgtggcataagatgtaaagtttgtaattaatgttaatttctgtgcattttaatattcttttataattattaatgttaatttctgtgcattttaatattcttttataattatgagcattttaataaattcatttttacaaacaaaaaaaaaaaaaaaa

SEQ ID NO: 586 - DNA, 2879 bp, Homo sapiens
acgcggaagtcaggtaggagcacccgccgctggcagccactctcctggccgccaaaccccagctggaactccggccacagccagcatgcagggcgaagagagcctccggatcctggtggagcccgaaggggacagcttcccgctgatggagatcagcacctgtgagaccgaggcctccgagcagtgggactatgtcctcgtggcccaacgtcacacccagagagacccccggcaggcgcggcagcaacagttcctggaggagctcaggagaaagggcttccacattaaggtgatccgggaccagaaacaggtcttctttgggatccgtgctgacaacagtgtctttggcctgtaccgcactctcctcctggagcctgaggggcctgccccccacgccgagctggccgcgccgaccaccatcccggtcaccacgagtctcagaatccgaatcgtgaacttcgttgtcatgaacaacaagacctcggctggtgagaccttcgaggatctgatgaaggacggggtctttgaggccaggttccccctgcacaagggggagggacgcctgaagaagacgtgggcgcggtggagacacatgttccgggagcagccagttgatgaaatcaggaactactttggggaaaaggtggccctgtacttcgtctggctgggctggtacacctacatgctggtgccggccgccctgacgggcctcttagtctttctgagcggattctcgctgtttgaggccagccagatcagcaaggagatctgtgaggcccacgacatcctcatgtgtcccctcggcgaccacagccgcaggtaccagcggctctcggaaacctgcacttttgccaagctcacccacctctttgacaatgatggcacggtggtgttcgccatcttcatggctctctgggccacggtgttcctggagatctggaagcggcagcgcgcccgcgtggtcctgcactgggacctgtacgtgtgggacgaggaacaggaggaaatggcacttcagctcattaactgccccgactacaagctccggccataccagcactcctacctacgcagcaccgtcatcctcgtcctgaccctgctcatgatctgcctcatgatcggcatggcccacgtcctggtggtctaccgcgtcctggcctccgcgctcttcagcagctcggccgtgcccttcctggaggagcaggtgaccacggccgtggtggtgaccggggctctggtgcactatgtgaccatcatcatcatgaccaagatcaacaggtgcgtggccctgaagctttgtgacttcgagatgcccaggaccttctcggagcgagagagcaggttcaccatccgcttcttcacactgcagttcttcacccatttctcgtctctcatctacatcgccttcatcctgggcaggatcaacggccaccccgggaagtccacgcgcctggcgggcttgtggaagctggaagagtgccacgccagcggctgcatgatggacctcttcgtgcagatggccatcatcatgggcctgaagcagacgctcagcaactgcgtcgagtacctggtcccgtgggtgacccacaagtgccgctctctgcgggcctccgagtccgggcacctgccccgggaccccgagctcagggactggcggcgcaactaccttctgaacccggtcaacaccttcagcctgttcgacgagttcatggagatgatgatccagtacggcttcaccaccatcttcgtggccgccttcccgctggcgccgctgctcgcgctcttcagcaacctcgtggagatccgcctggacgccatcaagatggtctggttgcagcggcgcctggtgccgcgcaaggccaaggacatcgggacctggctgcaggtgctggagaccatcggtgtgctggcggtcattgccaatgggatggtcattgccttcacatctgagttcatcccccgagtggtctacaagtaccgctatagcccatgcctgaaagaaggcaactctactgtcgactgcctcaagggctacgtcaaccacagcctgtccgtcttccacaccaaggacttccaggaccctgatgggattgagggctcagaaaacgtgactctgtgcagatacagggactaccgcaatccccccgattacaacttctccgagcagttctggttcctcctggccatccgcctggccttcgtcatcctctttgagcacgtggccttgtgcatcaagctcatcgccgcctggttcgtgcccgacatccctcagtcggtgaagaacaaggttctggaggtgaagtaccagaggctgcgtgagaagatgtggcatggaaggcagaggctgggtggggtgggggcaggctctcggcccccaatgcctgcccatcccaccccagcatccatcttcagtgccaggagcacagacgtgtagggccagagcccgtccagaggccaccaggagctgagacagtgccaccaccagcacctcccacaagcccaccgctgtgcgtgttgaggggtgctgtgagaaggctgtgcccatgtggggccgcaggaatcccctgtatgttcagggctgtgagctgccaccctattccgcctgctccgtctttgtgggggctctcaggcttggcacagccctgacttgaactctgggtgaccctgggcacccacagaactgggagtgagggctcctcaggcagccacaaggcaggaaaactggcgcaaatttcctgggcctccctctgacttctgggcgccagatcctgccgtgcccccatcctggctgttgggggtgtcctgagcccacctcgctggcctgttcccttcagccaacccgtttctgcagtaaaattaagcctgtctgtcttgcaaaa

SEQ ID NO: 587 - DNA, 3767 bp, Homo sapiens
agcggactgggcatgctcggcagcccgggaggctcgcggtggcaagtcgaaagcgttcgcaccagcggggcagcggctgcgggcggcaggcggcgggcaggtcgggagtgagaaggaccggcctgggctgactgctctcccctcgcgcctagggagccggtcggagagcgcgattggggtgcggagccccgacgctgccctgccccggatttcattccgcggcgggggctccgcgagcggaattccggcggctgccgtgactccagtgcaacgtgacgacagcatgtacgatccctgaatgggcccgtgggcatatttagtcattcatttttgatcaggagaaagaagacagccatcatttgaaaggtaaagcttcagcgactgaaggagtgtggactttttgaatttcaagaacagtaaagttggaacacagcagagggtgtgtaataaaatacagattggaaagaagactgatgaagaaaaataacagcatgattcaggcacaccattgagttctttgggatgcccgaaagtgtctggttgggaaacatgaaatagaagacgagaacctgcctcagcaagcgtacctgagaatacttttaaaggaacctgttgataaatgcaaaacagtggctgttgcaggtgatggaactgtactggaacaatgggagaagctggtagcttataggaagccaagatgaccagaatgtttttaaataatccaaggaagaatcctgctcaaaaatgaggtgaattaatacttgggcgctcaggaaccctggacagctacatgaggtgtttaaaaactgccctgaccatcttgccaaacaagtctctgctcatgaggccccacaggatgaacgagccgaggcaggacagtgtcctgccctgtcggaacagtgactgctgacctgccaagagagagctggggactgcctgctgtctgccagtacaatgaaggaagtggtttattggtcacccaagaaggtggcagactggctgctggagaatgctatgccagaatactgtgagcctctggagcatttcacaggccaggacttgatcaacctaacccaagaggatttcaaaaaaccccccttgtgccgagtctcctctgacaatgggcagcggctcctggacatgatagaaaccctgaaaatggagcaccatttggaagcacacaagaacggccatgccaatgggcacctcaacattggcgtagacatccccacccccgacggcagcttcagcatcaagattaaacccaacgggatgccaaatgggtataggaaagagatgataaagatccccatgccagaactggagcgctctcagtaccccatggagtggggcaagacttttctggcctttctttatgcactttcctgtttcgttctcaccacagtgatgatctcggtcgtccacgaacgagtacctcctaaggaggtgcagcctccactaccggacacattttttgaccattttaaccgggtgcagtgggccttttctatttgtgaaattaatggcatgatccttgtaggactctggttaattcagtggctgctcttaaaatacaagtctattattagcagaagatttttctgcatagttggcacgctgtacctgtatcggtgtattacaatgtatgtaactacactcccagtacctggtatgcatttcaactgttctccgaagcttttcggagactgggaagcccaactgcgaagaataatgaagctcattgctggaggtggcttgtctatcactggctctcacaacatgtgtggggactatctgtacagcggccacacggtcatgctaacacttacctacttatttatcaaagagtattcccctcggcgactctggtggtatcactggatttgctggcttctcagcgtagttggaatcttctgtattctcttagcgcatgaccactacactgtggacgtggtggtggcatattacatcaccacgagactcttctggtggtatcacactatggccaatcagcaagtgctaaaggaagcttcccagatgaacctcctggccagggtgtggtggtacaggccatttcagtactttgaaaagaatgtccaaggaattgtacctcgatcttaccattggcctttcccctggccagtagtccacctcagtaggcaagttaaatacagccggctggtgaatgacacataacagctgtacaaagtggggaaaagacaaattgtccgaagtgctaagaactccatgagagaagatgccataaaataaacacctccctaatcctattatctttcaatggttaccttgacttaacctattgagttacctggtcagcactgtgatctttttttctctccaaaggacctgcgttggacaacaataaagaaaaatttaacctatcatgcactgtacacatttcctgttcataagtttgggatttacataacccgcaaccaccatgttcctttgtatatgatgcagcagcataaatgtaagcttttatatcataagttctggtctttccagtcacatctggaaataaagcgtattattttcttgggaaaacatacttttcatatctcttgccccaaagattgggctgtaagccattttctagcaaatgtctctatgaaggtttctaagtacctgaatggggtttgattctgaaatctttctacctgttgcaccgatattcaaataaaaatgatagacacagaaaggtttggtaactttgggttttgtaaaatcagcaaaggcagtgtttcaaaaagtgcaaaaaaaaagattctgttataaagtgattttctaagtatttcctaactttatttttcaaaatgatgttatgaacaccaaatttaaagatttttaacatgtcagagagaagagagttaaaatttaaaaatgcatcttgggagagaaatttgtctatgtttctagtgcctttcttgtcttgattgtatggtcagtaggcaatcttaaatgtttttatttaaaataaagtattccttgaaaatataaatatatgtatacactactaaattttgcatttatagctaaattgaatcagaagactgcttatggttttaaaattgcaatgacttaaataatgaggttgttaattagagtcagagcctgttcacatattgtgatcaggtagcaatgacatgtaccacttaaattattttatcgtcgatttggtagttcaattttaactactcaatgaaaacagccatgaatatcttttcttaaagagagttttgaaaatgatcacttacctaaaacttgaaagctatgaattagttatccatactctcatgacaattttgttggtgaacaacaaaaaagagatctatttctttaaaagatatttgtgcagaaactgcatgtaactctaagttttactcctaacatacatatgtttggggaagtattctattctatacttgccaatgtggagaacaaaatagttttttaagaatgaagaagtatatatatccattctgtattttacgtgcagcagaattatcttccgtaggatttttttgtgtattcacaaggtgatatttgtattgtaaaacaataatggtgaaggaaataaaaaggcttttaaaattttgtttgttttaaatctttgtaaagttattattccagagagtatactggtatcttacagcttacctagatcataaattaatcaaaatgcactttttaataaaaactgatacttaaaataaatggctgttatttctaaaaaaaaaaaaaaa

SEQ ID NO: 588 - DNA, 1564 bp, Homo sapiens
gaagcacatctggacagctgtgcggcctccttgcgggccgacgtcagccgagcacgtcccccacgtcctctccttctcgccacttattatttattcgttttcccaaagaagcgactagggacccaagtttaaaaattcctccccccactcaatgcgagacgtggccagatcccatccaacacacggtttaattttcatggggctctgggatcaaaagaacagaaacagcaacaacaaaagcccagccgctgtctgattttaagctggcaaagtgggaaaaataaagtgttgagtaaacagaccaagttggatcatggggaatttcagaggtcatgccctccctggaaccttcttttttattattggtctttggtggtgtacaaagagtattctgaagtatatctgcaaaaagcaaaagcgaacctgctatcttggttccaaaacattattctatcgattggaaattttggagggaattacaatagttggcatggctttaactggcatggctggggagcagtttattcctggagggccccatctgatgttatatgactataaacaaggtcactggaatcaactcctgggctggcatcatttcaccatgtatttcttctttgggctgttgggtgtggcagatatcttatgtttcaccatcagttcacttcctgtgtccttaaccaagttaatgttgtcaaatgccttatttgtggaggcctttatcttctacaaccacactcatggccgggaaatgctggacatctttgtgcaccagctgctggttttggtcgtctttctgacaggcctcgttgccttcctagagttccttgttcggaacaatgtacttctggagctattgcggtcaagtctcattctgcttcaggggagctggttctttcagattggatttgtcctgtatccccccagtggaggtcctgcatgggatctgatggatcatgaaaatattttgtttctcaccatatgcttttgttggcattatgcagtaaccattgtcatcgttggaatgaattatgctttcattacctggttggttaaatctagacttaagaggctctgctcctcagaagttggacttctgaaaaatgctgaacgagaacaagaatcagaagaagaaatgtgactttgatgagcttccagtttttctagataaaccttttcttttttacattgttcttggttttgtttctcgatcttttgtttggagaacagctggctaaggatgactctaagtgtactgtttgcatttccaatttggttaaagtatttgaatttaaatattttctttttagctttgaaaatattttgggtgatactttcattttgcacatcatgcacatcatggtattcaggggctagagtgatttttttccagattatctaaagttggatgcccacactatgaaagaaatatttgttttatttgccttatagatatgctcaaggttactgggcttgctactatttgtaactccttgaccatggaattatacttgtttatcttgttgctgcaatgagaaataaatgaatgtatgtattttggtgc

SEQ ID NO: 589 - DNA, 7616 bp, Homo sapiens
attacagaggaaggagctcgctatataagccagccaaagttggctgcaccggccacagcctgcctactgtcacccgcctctcccgcgcgcagatacacgcccccgcctccgtgggcacaaaggcagcgctgctggggaactcgggggaacgcgcacgtgggaaccgccgcagctccacactccaggtacttcttccaaggacctaggtctctcgcccatcggaaagaaaataattctttcaagaagatcagggacaactgatttgaagtctactctgtgcttctaaatccccaattctgctgaaagtgagataccctagagccctagagccccagcagcacccagccaaacccacctccaccatgggggccatgactcagctgttggcaggtgtctttcttgctttccttgccctcgctaccgaaggtggggtcctcaagaaagtcatccggcacaagcgacagagtggggtgaacgccaccctgccagaagagaaccagccagtggtgtttaaccacgtttacaacatcaagctgccagtgggatcccagtgttcggtggatctggagtcagccagtggggagaaagacctggcaccgccttcagagcccagcgaaagctttcaggagcacacagtggatggggaaaaccagattgtcttcacacatcgcatcaacatcccccgccgggcctgtggctgtgccgcagcccctgatgttaaggagctgctgagcagactggaggagctggagaacctggtgtcttccctgagggagcaatgtactgcaggagcaggctgctgtctccagcctgccacaggccgcttggacaccaggcccttctgtagcggtcggggcaacttcagcactgaaggatgtggctgtgtctgcgaacctggctggaaaggccccaactgctctgagcccgaatgtccaggcaactgtcaccttcgaggccggtgcattgatgggcagtgcatctgtgacgacggcttcacgggcgaggactgcagccagctggcttgccccagcgactgcaatgaccagggcaagtgcgtaaatggagtctgcatctgtttcgaaggctacgccggggctgactgcagccgtgaaatctgcccagtgccctgcagtgaggagcacggcacatgtgtagatggcttgtgtgtgtgccacgatggctttgcaggcgatgactgcaacaagcctctgtgtctcaacaattgctacaaccgtggacgatgcgtggagaatgagtgcgtgtgtgatgagggtttcacgggcgaagactgcagtgagctcatctgccccaatgactgcttcgaccggggccgctgcatcaatggcacctgctactgcgaagaaggcttcacaggtgaagactgcgggaaacccacctgcccacatgcctgccacacccagggccggtgtgaggaggggcagtgtgtatgtgatgagggctttgccggtgtggactgcagcgagaagaggtgtcctgctgactgtcacaatcgtggccgctgtgtagacgggcggtgtgagtgtgatgatggtttcactggagctgactgtggggagctcaagtgtcccaatggctgcagtggccatggccgctgtgtcaatgggcagtgtgtgtgtgatgagggctatactggggaggactgcagccagctacggtgccccaatgactgtcacagtcggggccgctgtgtcgagggcaaatgtgtatgtgagcaaggcttcaagggctatgactgcagtgacatgagctgccctaatgactgtcaccagcacggccgctgtgtgaatggcatgtgtgtttgtgatgacggctacacaggggaagactgccgggatcgccaatgccccagggactgcagcaacaggggcctctgtgtggacggacagtgcgtctgtgaggacggcttcaccggccctgactgtgcagaactctcctgtccaaatgactgccatggccagggtcgctgtgtgaatgggcagtgcgtgtgccatgaaggatttatgggcaaagactgcaaggagcaaagatgtcccagtgactgtcatggccagggccgctgcgtggacggccagtgcatctgccacgagggcttcacaggcctggactgtggccagcactcctgccccagtgactgcaacaacttaggacaatgcgtctcgggccgctgcatctgcaacgagggctacagcggagaagactgctcagaggtgtctcctcccaaagacctcgttgtgacagaagtgacggaagagacggtcaacctggcctgggacaatgagatgcgggtcacagagtaccttgtcgtgtacacgcccacccacgagggtggtctggaaatgcagttccgtgtgcctggggaccagacgtccaccatcatccaggagctggagcctggtgtggagtactttatccgtgtatttgccatcctggagaacaagaagagcattcctgtcagcgccagggtggccacgtacttacctgcacctgaaggcctgaaattcaagtccatcaaggagacatctgtggaagtggagtgggatcctctagacattgcttttgaaacctgggagatcatcttccggaatatgaataaagaagatgagggagagatcaccaaaagcctgaggaggccagagacctcttaccggcaaactggtctagctcctgggcaagagtatgagatatctctgcacatagtgaaaaacaatacccggggccctggcctgaagagggtgaccaccacacgcttggatgcccccagccagatcgaggtgaaagatgtcacagacaccactgccttgatcacctggttcaagcccctggctgagatcgatggcattgagctgacctacggcatcaaagacgtgccaggagaccgtaccaccatcgatctcacagaggacgagaaccagtactccatcgggaacctgaagcctgacactgagtacgaggtgtccctcatctcccgcagaggtgacatgtcaagcaacccagccaaagagaccttcacaacaggcctcgatgctcccaggaatcttcgacgtgtttcccagacagataacagcatcaccctggaatggaggaatggcaaggcagctattgacagttacagaattaagtatgcccccatctctggaggggaccacgctgaggttgatgttccaaagagccaacaagccacaaccaaaaccacactcacaggtctgaggccgggaactgaatatgggattggagtttctgctgtgaaggaagacaaggagagcaatccagcgaccatcaacgcagccacagagttggacacgcccaaggaccttcaggtttctgaaactgcagagaccagcctgaccctgctctggaagacaccgttggccaaatttgaccgctaccgcctcaattacagtctccccacaggccagtgggtgggagtgcagcttccaagaaacaccacttcctatgtcctgagaggcctggaaccaggacaggagtacaatgtcctcctgacagccgagaaaggcagacacaagagcaagcccgcacgtgtgaaggcatccactgaacaagcccctgagctggaaaacctcaccgtgactgaggttggctgggatggcctcagactcaactggaccgcagctgaccaggcctatgagcactttatcattcaggtgcaggaggccaacaaggtggaggcagctcggaacctcaccgtgcctggcagccttcgggctgtggacataccgggcctcaaggctgctacgccttatacagtctccatctatggggtgatccagggctatagaacaccagtgctctctgctgaggcctccacaggggaaactcccaatttgggagaggtcgtggtggccgaggtgggctgggatgccctcaaactcaactggactgctccagaaggggcctatgagtactttttcattcaggtgcaggaggctgacacagtagaggcagcccagaacctcaccgtcccaggaggactgaggtccacagacctgcctgggctcaaagcagccactcattataccatcaccatccgcggggtcactcaggacttcagcacaacccctctctctgttgaagtcttgacagaggaggttccagatatgggaaacctcacagtgaccgaggttagctgggatgctctcagactgaactggaccacgccagatggaacctatgaccagtttactattcaggtccaggaggctgaccaggtggaagaggctcacaatctcacggttcctggcagcctgcgttccatggaaatcccaggcctcagggctggcactccttacacagtcaccctgcacggcgaggtcaggggccacagcactcgaccccttgctgtagaggtcgtcacagaggatctcccacagctgggagatttagccgtgtctgaggttggctgggatggcctcagactcaactggaccgcagctgacaatgcctatgagcactttgtcattcaggtgcaggaggtcaacaaagtggaggcagcccagaacctcacgttgcctggcagcctcagggctgtggacatcccgggcctcgaggctgccacgccttatagagtctccatctatggggtgatccggggctatagaacaccagtactctctgctgaggcctccacagccaaagaacctgaaattggaaacttaaatgtttctgacataactcccgagagcttcaatctctcctggatggctaccgatgggatcttcgagacctttaccattgaaattattgattccaataggttgctggagactgtggaatataatatctctggtgctgaacgaactgcccatatctcagggctaccccctagtactgattttattgtctacctctctggacttgctcccagcatccggaccaaaaccatcagtgccacagccacgacagaggccctgccccttctggaaaacctaaccatttccgacattaatccctacgggttcacagtttcctggatggcatcggagaatgcctttgacagctttctagtaacggtggtggattctgggaagctgctggacccccaggaattcacactttcaggaacccagaggaagctggagcttagaggcctcataactggcattggctatgaggttatggtctctggcttcacccaagggcatcaaaccaagcccttgagggctgagattgttacagaagccgaaccggaagttgacaaccttctggtttcagatgccaccccagacggtttccgtctgtcctggacagctgatgaaggggtcttcgacaattttgttctcaaaatcagagataccaaaaagcagtctgagccactggaaataaccctacttgcccccgaacgtaccagggacataacaggtctcagagaggctactgaatacgaaattgaactctatggaataagcaaaggaaggcgatcccagacagtcagtgctatagcaacaacagccatgggctccccaaaggaagtcattttctcagacatcactgaaaattcggctactgtcagctggagggcacccacagcccaagtggagagcttccggattacctatgtgcccattacaggaggtacaccctccatggtaactgtggacggaaccaagactcagaccaggctggtgaaactcatacctggcgtggagtaccttgtcagcatcatcgccatgaagggctttgaggaaagtgaacctgtctcagggtcattcaccacagctctggatggcccatctggcctggtgacagccaacatcactgactcagaagccttggccaggtggcagccagccattgccactgtggacagttatgtcatctcctacacaggcgagaaagtgccagaaattacacgcacggtgtccgggaacacagtggagtatgctctgaccgacctcgagcctgccacggaatacacactgagaatctttgcagagaaagggccccagaagagctcaaccatcactgccaagttcacaacagacctcgattctccaagagacttgactgctactgaggttcagtcggaaactgccctccttacctggcgacccccccgggcatcagtcaccggttacctgctggtctatgaatcagtggatggcacagtcaaggaagtcattgtgggtccagataccacctcctacagcctggcagacctgagcccatccacccactacacagccaagatccaggcactcaatgggcccctgaggagcaatatgatccagaccatcttcaccacaattggactcctgtaccccttccccaaggactgctcccaagcaatgctgaatggagacacgacctctggcctctacaccatttatctgaatggtgataaggctgaggcgctggaagtcttctgtgacatgacctctgatgggggtggatggattgtgttcctgagacgcaaaaacggacgcgagaacttctaccaaaactggaaggcatatgctgctggatttggggaccgcagagaagaattctggcttgggctggacaacctgaacaaaatcacagcccaggggcagtacgagctccgggtggacctgcgggaccatggggagacagcctttgctgtctatgacaagttcagcgtgggagatgccaagactcgctacaagctgaaggtggaggggtacagtgggacagcaggtgactccatggcctaccacaatggcagatccttctccacctttgacaaggacacagattcagccatcaccaactgtgctctgtcctacaaaggggctttctggtacaggaactgtcaccgtgtcaacctgatggggagatatggggacaataaccacagtcagggcgttaactggttccactggaagggccacgaacactcaatccagtttgctgagatgaagctgagaccaagcaacttcagaaatcttgaaggcaggcgcaaacgggcataaattccagggaccactgggtgagagaggaataaggcccagagcgaggaaaggattttaccaaagcatcaatacaaccagcccaaccatcggtccacacctgggcatttggtgagagtcaaagctgaccatggatccctggggccaacggcaacagcatgggcctcacctcctctgtgatttctttctttgcaccaaagacatcagtctccaacatgtttctgttttgttgtttgattcagcaaaaatctcccagtgacaacatcgcaatagttttttacttctcttaggtggctctgggaatgggagaggggtaggatgtacaggggtagtttgttttagaaccagccgtattttacatgaagctgtataattaattgtcattatttttgttagcaaagattaaatgtgtcattggaagccatccctttttttacatttcatacaacagaaaccagaaaagcaatactgtttccattttaaggatatgattaatattattaatataataatgatgatgatgatgatgaaaactaaggatttttcaagagatctttctttccaaaacatttctggacagtacctgattgtattttttttttaaataaaagcacaagtacttttgagtttgttaaaaaaaaaaaaaaaaaa

SEQ ID NO: 590 - DNA, 1204 bp, Homo sapiens
gaaattcttacaaaaactgaaagtgaaatgaggaagacagattgagcaatccaatcggagggtaaatgccagcaaacctactgtacagtaggggtagagatgcagaaaggcagaaaggagaaaattcaggataactctcctgaggggtgagccaagccctgccatgtagtgcacgcaggacatcaacaaacacagataacaggaaatgatccattccctgtggtcacttattctaaaggccccaaccttcaaagttcaagtagtgatatggatgactccacagaaagggagcagtcacgccttacttcttgccttaagaaaagagaagaaatgaaactgaaggagtgtgtttccatcctcccacggaaggaaagcccctctgtccgatcctccaaagacggaaagctgctggctgcaaccttgctgctggcactgctgtcttgctgcctcacggtggtgtctttctaccaggtggccgccctgcaaggggacctggccagcctccgggcagagctgcagggccaccacgcggagaagctgccagcaggagcaggagcccccaaggccggcctggaggaagctccagctgtcaccgcgggactgaaaatctttgaaccaccagctccaggagaaggcaactccagtcagaacagcagaaataagcgtgccgttcagggtccagaagaaacagtcactcaagactgcttgcaactgattgcagacagtgaaacaccaactatacaaaaaggatcttacacatttgttccatggcttctcagctttaaaaggggaagtgccctagaagaaaaagagaataaaatattggtcaaagaaactggttacttttttatatatggtcaggttttatatactgataagacctacgccatgggacatctaattcagaggaagaaggtccatgtctttggggatgaattgagtctggtgactttgtttcgatgtattcaaaatatgcctgaaacactacccaataattcctgctattcagctggcattgcaaaactggaagaaggagatgaactccaacttgcaataccaagagaaaatgcacaaatatcactggatggagatgtcacattttttggtgcattgaaactgctgtgacctacttacaccatgtctgtagctattttcctccctttctctgtacctctaagaagaaagaatctaactgaaaatacca

SEQ ID NO: 591 - DNA, 1204 bp, Homo sapiens; identical to SEQ ID NO: 590

SEQ ID NO: 592 - DNA, 2425 bp, Homo sapiens
acgcggggattctgtgtaattcctatccacagtcacttctgttcatttttaatgaaaacctattgctgttattttctattatgagttaacggtgatgtgtgttttttaaattttgtatacttgctctcaccctaaaatataccttaagagacttttcccctgtttttctttctgctttccaagactccaggaaaaacagcttccatggcacattttgtacagggcacatctagaatgattgccgcagaaagttctacggagcataaagagtgtgctgaaccatcaacaagaaagaacttgatgaattctcttgaacaaaagataaggtgtttggaaaaacaaagaaaagagctcctggaagttaaccagcaatgggatcagcaatttagaagtatgaaagagttatatgaaagaaaggtagcagagctgaagacgaaactggacgccgcggaaagattcctcagcacgcgggagaaggatccgcatcagaggcagagaaaggacgacaggcagagagaggacgacaggcagcgcgacctgacccgggaccggctgcagcgggaggagaaggaaaaggaacgcctaaatgaagaattacatgaattgaaagaagagaataaacttttaaagggaaaaaatactcttgcgaacaaggaaaaggaacattacgaatgtgaaataaaacgcctcaataaggctcttcaggatgccttgaatatcaagtgttcattttccgaggactgtttgaggaagtctcgagtggaattctgccatgaggagatgagaacagaaatggaagttctgaagcagcaggtgcaaatatacgaagaagacttcaaaaaggaacgatcggatcgagagagacttaatcaagagaaagaggagctacagcaaattaatgaaacttcccaatcccagttgaacaggctgaattcccagataaaagcttgtcagatggagaaagaaaaactagaaaagcaattaaaacagatgtattgcccaccctgtaactgcggcttggttttccacctgcaagatccatgggtaccaacaggccctggagctgtgcagaagcaacgggagcacccaccagactgtcagtggtatgctcttgaccagcttccgccagatgtacaacacaaggcaaatggtttatcctcagtaaagaaagtccatccgtagaagtacacactaacagagagagacaacaggcaacgagggagcgtggctgaggaccctcttctttgtttatactgaggcttgtttctgccacaaaggcacatcatctaccctgttatttgtgcctggtcatgttttcctttggtatgaatacaggaaaaggcttctgacagctaagatcctgatcaaattggaggagccagttattatacaaccaaatacaacttccagtttccttgaaatgagacttggcagatggatgatgcacgactccctgaaaatctcttcagcatattgctgttggatgcacaaaaatgattctatgatttaggcaactcagtgtttgctgcagggatattgtatgttgatttaaagtgcatatgtgtgtgtgtgtgtgtgtgtgtgtgtgtgtttcctggggtaaaaatttctgcagttgtaaacgtttaacattgctcccattcttcttccacagggccttagttctttagctatttgactacatattgttgacctcagtgatcctaaacgtagaattgaagaggtgtatatacctcgttaaattaaataagtggttcaatctgaataagatggttaattggaagctattccttagacagatcatttctttaagatggtgagaaattgtgcgcctgcatcacaagacttgattatgaaagataaagtcttgggctgggtgcagtggctcatgcctataatcccagcactttgggaggctgaggcaggtggattgctttgaggccaggagttctagaccagcctggccagcatggtgaaaccccatctctactataaatacaaaaattagccaggctcgtggcacacacctataaacccagctactcaggaggcttgaggcgggaggatcacttgagcccagggaggcagaggttgctgtaagttgagatcgccactgcactccagcctgggaaatagagtgagcaagactcagtgccccctacccacccactccacaccaccaaaaaaaaaaaaaaaaaaaaaaggaagacaaagtcctgatgggatgatgatggctatatggctatgctgtgtccatatatacttacagaaatatttcagacatatggatttatagttaaatctgtgtttttccttcctatggatttgattaattttaatgaaaaacttaattctgactcctcaagccaattaaaatgaaaatggaatttatttaaaaaaaaaaaaaaaaaaaaaaaaaaaaaaa

SEQ ID NO: 593 - DNA, 698 bp, Homo sapiens
tcatctttgggtggtggagtgcaaaggaggcgacctgcaacagaggagtcccggtcaccagcaaccatgacggaccagcaggctgaggccaggtcctacctcagcgaagagatgatcgctgagttcaaggctgcctttgacatgtttgatgctgatggtggtggggacatcagcgtcaaggagttgggcacggtgatgaggatgctgggccagacacccaccaaggaggagctggacgccatcatcgaggaggtggatgaggacggcagcggcaccatcgacttcgaggagttcttggtcatgatggtgcgccagatgaaagaggacgcgaaagggaagagcgaggaggagctggccgagtgcttccgcatcttcgacaggaatgcagacggctacatcgacccggaggagctggctgagattttcagggcctccggggagcacgtgacggacgaggagatcgaatctctgatgaaagacggcgacaagaacaacgacggccgcattgacttcgacgagttcctgaagatgatggagggcgtgcagtaaggagtggacagtcgcctctaccaagatcgcgtgtccctagggtgtgggagactccgccctgccgggtccccaccagggaggcgcgaccccttgtgggtctttgtctggaaggaataaaagcaaatgttccaaaaaaaaaaaaaaaaaaa

SEQ ID NO: 594 - DNA, 4575 bp, Homo sapiens
cagggaggggaagacggggagccggacgcacgaccggcgagcacagaagggcacaggagctgctccgcgagataccagcgagctgaggcgcggggctggctgggaagtagtcccggccgggccctggccccgcccctgcagggcggagggacgcatcacgcaggggtggggaagccggatccgtgcgcagggttgctaagggtgaaacttttcattgactttgctcacttcgggccggggcgcgggaaggtgcgggttgttggctgaggcaagccgtggctcgggcgacgcggggccaggagggcaggaccgtctgccggcgacagcccataccgtctgccgttgcgcgacacgaaccaccctccgatccgccatccccgcgtcgtcgccgctagtccgcccgcccgccctcgggccccccgctgccgagcccgacctcctaagagctgaaagaaattattgagagtcatagtccatagccccctgcttcgtcccccaaccctcaacgacgaaaaggacttcggtcccctggcccggcgacgcccgggaaggaaaggagagcgacctccgccccgcgctcaggccaccctggagggagaagccgccccgcggccggtagagcgccccgccgccgcggagacccgaagccgcctggagcccaaggctgtacacgtgccctgtgctgattctctgcctaggaaaggaccatgcagctagagatcaaagtggccctgaacttcatcatctcctacttgtacaacaagctgccccggcgccgggcagacctgtttggggaggagctagagcggcttttgaaaaagaaatatgaaggccactggtaccctgagaagccactgaaaggctctggcttccgctgtgttcacattggggagatggtggaccccgtggtggagctggccgccaagcggagtggcctggcggtggaagatgtgcgggccaatgtgcctgaggagctgagtgtctggattgatccctttgaggtgtcctaccagattggtgagaagggagctgtgaaagtgctgtacctggatgacagtgagggttgcggtgccccagagctggacaaggagatcaagagcagcttcaaccctgacgcccaggtgttcgtgcccattggcagccaggacagctccctgtccaactccccatcgccatcctttggccagtcacccagccctaccttcattccccgctccgctcagcccatcaccttcaccaccgcctccttcgctgccaccaaatttggctccactaagatgaagaaggggggcggggcagcaagtggtgggggtgtagccagcagtggggcgggtggccagcagccaccacagcagcctcgcatggcccgctcacccaccaacagcctgctgaagcacaagagcctctctctgtctatgcattcactgaacttcatcacggccaacccggcccctcagtcccagctctcacccaatgccaaggagttcgtgtacaacggtggtggctcacccagcctcttctttgatgcggccgatggccagggcagcggcaccccaggcccgtttggaggcagtggggctggcacctgcaacagcagcagctttgacatggcccaggtatttggaggtggtgccaacagcctcttcctggagaagacaccctttgtggaaggcctcagctacaacctgaacaccatgcagtatcccagccagcagttccagcccgtggtgctggccaactgaccatctacctgcccgtggggccaggagcacccaagaccacagaaaagagaaaggaaaggccaaaaaaaagaggaaaagaaaaatgtacaaaaagattttcgatcttctcactcttacttctagaaaaaagatccagcccaggcacggaatgggagggccctgcaaagcacccaagtgtgtttcactcaccccttaccgctcgcccaccggcctgtgatttatttggttggtttgggttttatatttctttttcttttttttttttcttacatgtagttttctatataacatctttaatgagtggcttcctgtgctaagaatggtccagatgtgaactgctgctccctgctcctcccttcctccttcacactcctagtttaggattgatgtgtccaagctcatagggaagaaagagctgcagctggagcctgaccctccctggaacagggagaggctggcccgtgtcactgcctctgtcacccagctatcctcgcactcaaagccatccaacctcagcaggccttctcgggccctgccacctgaataggtctgaccccagtccccactccctttcaggctgggccacagggagttgctggctggccacttgacaccctccccctggagctgatgtctgtgactacagggagattagcacttcgtctagtgaaactcctttcatctctgtcctatggccccaccccaccattccctctaggcccagaccatcatcatggccctggccattgatgtgtatgggctttctttccctcatgcagccccttcttccccaggctggatgttgtgggtagggaggggtgtgtgtgtgtgtatttggtttgctgtccttttttaaaggattccaagccatgtgaaacttcccttctggatgtgattctgggtcgcaagtccttatttatatgtgaggctggggaatgggctgggggtattggcagtccttttgcagggcagtgtgtgtggtggggtgacaccgctgtggcttagcccaagacactcccagaggaaaacactgcagaaggaactggtttgcagactgtggaaggatctgcagttttgtttttgaccaaaaaaataataataagttagctctgaagggcagagggaatacccaagcccctgatgcctatgagaagtccctggacttcaaccctcctgttgtttggccttagcccagagggagctgctcacctgagcacccttgggggtgggcagagaggcagggtgggattttagagttagtgtctgtgcgggggcagccctgagcctggagttgagactttggggtctcttagtttggaggtgttgagtgcatttgtgcccctgcctggttgagagcttcttggtacctcttgccaccccttctcactgccctgacccaaccccactggaccttgatgctgcgaggagtggtgtcctgacggactcagcactcccgcctgatgtattggatcataggagagcacttgctctcctgcctctgccaggagagggcttgttcctccaactctaggaggccaggcaagcatggacaggagccaagggagcagggtcattaactttttcttctttgcaaagtgggcacttggcatcagggtcccaatcaccagaaagcaccaaagcccctggcaccccacccactccatcctacccagggaccccaagtaggcaactgttatggcagtgggtccagcccaggccagcactgccagcctcctctccctgcagtaggcaccagctctacctcccccggcaggcaatgtcctggcttctcagcccagcaccatctgttcccctagacttctcaggggccagcccagtctgggccaccctttgtttccctcatcctcggctcccacacaggtgacagacccagcagatagcttctctctgggaaaggttggatgctgccttacatccccttctagccctcctcccatccacacacacaggcacccacccacaccaggtcggcttgtttctcacatgtagggagagaggggagaccaacccctttgtgtcttttgaaatacgaagaaaaatgtgtgttcaggagcatgactccagtgctgcgctcttgggcccagttcagtctgtcttgtctcaaatctaggcatttttgcttcaattttattttttttaagaatacaaaaacagaaatctgcactaatttacctggtttcgtaggaaaacttttttttattttttacattttttggtgtccgtttgtattgaataatttgctacatttgtaaaatgtaagaggtatataatatatgtatatttctaacgtaaaaaacataatttttttcttttcaagattttttcttaaaaagatgagagaaacatattttttcaggaaaaacaaactttaaaaaaaaaagaggagaaataaaaccttttctcccctttccccatcctctatctatccctctttcccaggaacaaatcaaaaggtggattatcttctgaagaatggaaactgttagtccagaatgatgtgtttttctcaatgcagtgagttatagattctctagttttctccctagggatgggaagggggcattgaggcaagcctggagaggagcccggggagcagggtcatgaacttttttctttagtgaaggaggaatacaatcaagggttttgtattcagaatgttgtgcaatattttggaatgggacattggtgtgtttagagattttagtttaaaaacaaaacaaaaagattgatcaaatctgtacagtttctattgttccagatttttttaagtttgtattaaaagcatgatacataatagccttcaaaaaaaaaa

SEQ ID NO: 595 - DNA, 2033 bp, Homo sapiens
gactagttctagatcgcgatctagaactagccgcgggagacgctgctgaggcggcttcggttgcgggtcggaacggcgctgctctgcggggccggtccaggctggcagctgccggcgcttggcggtgagggcgggctcccgagtggccccccaccgaaggcggtgggaccagcggctgaggccaggatgccgtccaggcggcgcggcggctcctcactcatcccagatgttggttatctttctgaagtagactgtccatggcctgaacattttccgaaaatcattttgagcaaaatatctgtttaataacaagataaccacatcaagatggttggaaagctgaagcagaacttactattggcatgtctggtgattagttctgtgactgtgttttacctgggccagcatgccatggaatgccatcaccggatagaggaacgtagccagccagtcaaattggagagcacaaggaccactgtgagaactggcctggacctcaaagccaacaaaacctttgcctatcacaaagatatgcctttaatatttattggaggtgtgcctcggagtggaaccacactcatgagggccatgctggacgcacatcctgacattcgctgtggagaggaaaccagggtcattccccgaatcctggccctgaagcagatgtggtcacggtcaagtaaagagaagatccgcctggatgaggctggtgttactgatgaagtgctggattctgccatgcaagccttcttactagaaattatcgttaagcatggggagccagccccttatttatgtaataaagatccttttgccctgaaatctttaacttacctttctaggttattccccaatgccaaatttctcctgatggtccgagatggccgggcatcagtacattcaatgatttctcgaaaagttactatagctggatttgatctgaacagctatagggactgtttgacaaagtggaatcgtgctatagagaccatgtataaccagtgtatggaggttggttataaaaagtgcatgttggttcactatgaacaacttgtcttacatcctgaacggtggatgagaacactcttaaagttcctccagattccatggaaccactcagtattgcaccatgaagagatgattgggaaagctgggggagtgtctctgtcaaaagtggagagatctacagaccaagtaatcaagccagtcaatgtaggagctctatcaaaatgggttgggaagataccgccagatgttttacaagacatggcagtgattgctcctatgcttgccaagcttggatatgacccatatgccaacccacctaactacggaaaacctgatcccaaaattattgaaaacactcgaagggtctataagggagaattccaactacctgactttcttaaagaaaaaccacagactgagcaagtggagtagcagaaccaggagcctcttccatacatgaggaaagattgctgccttttcagcagaagggaaattcctaggattggctgtcccctgccaagcttggtggagcgtctgcaccttggctgcgccgcctgtgcatttgccagtttcctcccactgagaggatggaggtgtccgcacagctttgggcctcgtgagggatctgcctcctgagcaaagagctcttgatcccgatttcatgcacagccctgcagtaaggagcccagaaggaacatgtgtttcctgttaaaactcctcttgttctcttttcttacattatgacgtttgttttcaaggagagggtttaaaaatgggatcctgtaagcagacttgggcagtctccttttgaaataggttgtctgtacatgttctaatgttttgtagaacacgtgtgcctgtttaagtgtattgatgtgaataatattaaatatcctaattatttaattcattgtattgtttctgagaagttgggaaattaccattatacatttacaacctaatgacttttgtattttatttttcaaaataaaagctttcaatgtgaagcaaaaaaaaaaaaaaaa

SEQ ID NO: 596 - DNA, 1910 bp, Homo sapiens
cttccccggctggggcggctggagagccgggagtcgctgggtgcgtggggctgcctcgccgcgtctcgccacgggctctgccagcagacagccttggcacacaggcacaagggctggagcccagagatgagagtgcccaagggagatgtgagcctggcgggctgcccgctaacctgtcgctgaagccccagaagcgggccctcaggccaggcctaccctgcctccggcccagcatgcgcctgtcggtgcggagggtgctgctggcagccggctgcgccctggtcctggtgctggcggttcagctgggacagcaggtgctagagtgccgggcggtgctggcgggcctgcggagcccccggggggccatgcggcctgagcaggaggagctggtgatggtgggcaccaaccacgtggaataccgctatggcaaggccatgccgctcatcttcgtgggtggcgtgcctcgcagtggcaccacgttgatgcgcgccatgctggacgcgcaccccgaggtgcgctgcggcgaggagacccgcatcatcccgcgcgtgctggccatgcgccaggcctggtccaagtctggccgtgagaagctgcggctggatgaggcgggggtgacggatgaggtgctggacgccgccatgcaggccttcatcctggaggtgattgccaagcacggagagccggcccgcgtgctctgcaacaaggacccatttacgctcaagtcctcggtctacctgtcgcgcctgttccccaactccaagttcctgctgatggtgcgggacggccgggcctccgtgcactccatgatcacgcgcaaagtcaccattgcgggctttgacctcagcagctaccgtgactgcctcaccaagtggaacaaggccatcgaggtgatgtacgcccagtgcatggaggtaggcaaggagaagtgcctgcctgtgtactacgagcagctggtgctgcaccccaggcgctcactcaagctcatcctcgacttcctcggcatcgcctggagcgacgctgtcctccaccatgaagacctcattggcaagcccggtggtgtctccctgtccaagatcgagcggtccacggaccaggtcatcaagcctgttaacctggaagcgctctccaagtggactggccacatccctggggatgtggtgcgggacatggcccagatcgcccccatgctggctcagctcggctatgacccttatgcaaacccccccaactatggcaaccctgaccccttcgtcatcaacaacacacagcgggtcttgaaaggggactataaaacaccagccaatctgaaaggatattttcaggtgaaccagaacagcacctcctcccacttaggaagctcgtgatttccagatctccgcaaatgacttcattgccaagaagagaagaaaatgcatttaagtggaaatcggacctctaatccaagcatattgcttgctattaatcgccaaaacaggactgctgatgaggaatgtatttgcatatgtttgcaaaagctgaatcattgaaaacgtaccttgaaactctctatctctggacactccagggtagagaatgaagggtatggaagtagtccggcttttgaaacttaggtattttatatttttcccctcaagaacttttttttaagagacagatttgccatcctccttaatttgcaggactgccttggtggctttgtttgctgggacaaggcccacaacctgtgcctctcctattgacccttactttgaattcaaagaatctatttaagagtttaatatatgaggctttctttgattcctcctcagttctacctagtttcacagaggaaaaaaatactctttgaataaagtgaacagaggctcatttgtttgtgccttactttactgaaaaaaaaaaaaaaaaaa

SEQ ID NO: 597 - DNA, 2018 bp, Homo sapiens
gagaggcaggcccatcgcaaggctgactgatccttcaaaggagcctcccagctaaaagccagcaggagagagaccttggccaccaagggtctgccagctcctggtggtccccactccagccacctgccagctcgagcctgaccctcgcctccaccctggctgctgcctgtaccgctctcagggctctgccagcagacagccttggcacacaggcacaagggctggagcccagagatgagagtgcccaagggagatgtgagcctggcgggctgcccgctaacctgtcgctgaagccccagaagcgggccctcaggccaggcctaccctgcctccggcccagcatgcgcctgtcggtgcggagggtgctgctggcagccggctgcgccctggtcctggtgctggcggttcagctgggacagcaggtgctagagtgccgggcggtgctggcgggcctgcggagcccccggggggccatgcggcctgagcaggaggagctggtgatggtgggcaccaaccacgtggaataccgctatggcaaggccatgccgctcatcttcgtgggtggcgtgcctcgcagtggcaccacgttgatgcgcgccatgctggacgcgcaccccgaggtgcgctgcggcgaggagacccgcatcatcccgcgcgtgctggccatgcgccaggcctggtccaagtctggccgtgagaagctgcggctggatgaggcgggggtgacggatgaggtgctggacgccgccatgcaggccttcatcctggaggtgattgccaagcacggagagccggcccgcgtgctctgcaacaaggacccatttacgctcaagtcctcggtctacctgtcgcgcctgttccccaactccaagttcctgctgatggtgcgggacggccgggcctccgtgcactccatgatcacgcgcaaagtcaccattgcgggctttgacctcagcagctaccgtgactgcctcaccaagtggaacaaggccatcgaggtgatgtacgcccagtgcatggaggtaggcaaggagaagtgcctgcctgtgtactacgagcagctggtgctgcaccccaggcgctcactcaagctcatcctcgacttcctcggcatcgcctggagcgacgctgtcctccaccatgaagacctcattggcaagcccggtggtgtctccctgtccaagatcgagcggtccacggaccaggtcatcaagcctgttaacctggaagcgctctccaagtggactggccacatccctggggatgtggtgcgggacatggcccagatcgcccccatgctggctcagctcggctatgacccttatgcaaacccccccaactatggcaaccctgaccccttcgtcatcaacaacacacagcgggtcttgaaaggggactataaaacaccagccaatctgaaaggatattttcaggtgaaccagaacagcacctcctcccacttaggaagctcgtgatttccagatctccgcaaatgacttcattgccaagaagagaagaaaatgcatttaagtggaaatcggacctctaatccaagcatattgcttgctattaatcgccaaaacaggactgctgatgaggaatgtatttgcatatgtttgcaaaagctgaatcattgaaaacgtaccttgaaactctctatctctggacactccagggtagagaatgaagggtatggaagtagtccggcttttgaaacttaggtattttatatttttcccctcaagaacttttttttaagagacagatttgccatcctccttaatttgcaggactgccttggtggctttgtttgctgggacaaggcccacaacctgtgcctctcctattgacccttactttgaattcaaagaatctatttaagagtttaatatatgaggctttctttgattcctcctcagttctacctagtttcacagaggaaaaaaatactctttgaataaagtgaacagaggctcatttgtttgtgccttactttactgaaaaaaaaaaaaaaaaaa

SEQ ID NO: 598 - DNA, 3015 bp, Homo sapiens
cagggtttattgttatgtaagttcttgttcagcttcctttgttttctttcacttctgagaatttaactttcgtttctcactcagctcctgtggggaaactcatttgtggagaccagccctctggcttggtgagtgaatctggtttacaccggctcctgccctgccttcactcttctcccctgattcaagactcctctgctttggactgaagcactgcaggagtttgtgaccaagaacttcaagagtcaagacagaaggaagccaagggagcagtgcaatggatttctcagtaaaggtagacatagagaaggaggtgacctgccccatctgcctggagctcctgacagaacctctgagcctagattgtggccacagcttctgccaagcctgcatcactgcaaagatcaaggagtcagtgatcatctcaagaggggaaagcagctgtcctgtgtgtcagaccagattccagcctgggaacctccgacctaatcggcatctggccaacatagttgagagagtcaaagaggtcaagatgagcccacaggaggggcagaagagagatgtctgtgagcaccatggaaaaaaactccagatcttctgtaaggaggatggaaaagtcatttgctgggtttgtgaactgtctcaggaacaccaaggtcaccaaacattccgcataaacgaggtggtcaaggaatgtcaggaaaagctgcaggtagccctgcagaggctgataaaggaggatcaagaggctgagaagctggaagatgacatcagacaagagagaaccgcctggaagaattatatccagatcgagagacagaagattctgaaagggttcaatgaaatgagagtcatcttggacaatgaggagcagagagagctgcaaaagctggaggaaggtgaggtgaatgtgctggataacctggcagcagctacagaccagctggtccagcagaggcaggatgccagcacgctcatctcagatctccagcggaggttgaggggatcgtcagtagagatgctgcaggatgtgattgacgtcatgaaaaggagtgaaagctggacattgaagaagccaaaatctgtttccaagaaactaaagagtgtattccgagtaccagatctgagtgggatgctgcaagttcttaaagagctgacagatgtccagtactactgggtggacgtgatgctgaatccaggcagtgccacttcgaatgttgctatttctgtggatcagagacaagtgaaaactgtacgcacctgcacatttaagaattcaaatccatgtgatttttctgcttttggtgtcttcggctgccaatatttctcttcggggaaatattactgggaagtagatgtgtctggaaagattgcctggatcctgggcgtacacagtaaaataagtagtctgaataaaaggaagagctctgggtttgcttttgatccaagtgtaaattattcaaaagtttactccagatatagacctcaatatggctactgggttataggattacagaatacatgtgaatataatgcttttgaggactcctcctcttctgatcccaaggttttgactctctttatggctgtgcctccctgtcgtattggggttttcctagactatgaggcaggcattgtctcatttttcaatgtcacaaaccacggagcactcatctacaagttctctggatgtcgcttttctcgacctgcttatccgtatttcaatccttggaactgcctagtccccatgactgtgtgcccaccgagctcctgagtgttctcattcctttacccacttctgcatagtagcccttgtgctgagactcagattctgcacctgagttcatctctactgagaccatctcttcctttctttccccttcttttacttagaatgtctttgtattcatttgctagggcttccatagcaaagcatcatagattgctgatttaaactgtaattgtattgccgtactgtgggctggaaatcccaaatctagattccagcagagttggttctttctgaggtctgcaaggaagggctctgttccatgcctctctccttggcttgtagaaggcatcttgtccctatgactcttcacattgtctttatgtacatctctgtgcccaagttttccctttttattaagacaccagtcatactggctcagggcccaccgctaatgccttaatgaaatcattttaacattatattctctacaaagaccttatttccaaataagataatatttggaggtattgggaataaaaactccaacatataaatttgaggaaggcacgatttcactcataacaatcttaccctttcttgcaagagatgcttgtacattattttcctaataccttggtttcactagtagtaaacattattattttttttatatttgcaaaggaaacatatctaatccttcctatagaaagaacagtattgctgtaattccttttcttttcttcctcatttcctctgccccttaaaagattgaagaaagagaaacttgtcaactcatatccacgttatctagcaaagtacataagaatctatcactaagtaatgtatccttcagaatgtgttggtttaccagtgacaccccatattcatcacaaaattaaagcaagaagtccatagtaatttatttgctaatagtggatttttaatgctcagagtttctgaggtcaaattttatcttttcacttacaagctctatgatcttaaataatttacttaatgtattttggtgtattttcctcaaattaatattggtgttcaagactatatctaattcctctgatcactttgagaaacaaacttttattaaatgtaaggcacttttctatgaattttaaatataaaaataaatattgttctgattattactgaaaagatgtcagccatttcaatgtcttgggaaacaattttttgtttttgttctgttttctttttgcttcaataaaacaatagctggctctaaaaaaaaaaaaaaaaaaaaaaaaaaa

SEQ ID NO: 599 - DNA, 4571 bp, Homo sapiens
agagatcttgcagccgcgagcgaagactgccctatcctcagactctaccgaaccccctgtggcctgcggagacgaggagacggacgggtctggtggccaatgagagcttcgatctcttgccccccgcccaatgggccgctgctcatgggccggggcgggactaggagggcaggtaggggcggtccgggctggcgcgcggcgcggcggctacgcggctgcggctcacagagctagcgcctctctgggtgtccgtgccagtgctgcgcgggaaggcaccaccaccacagccgccgccgctggccagggtgctggacaagacgggcccgtcggccacctcgccagctcaggcacccgctgcagccgtcgctgtctcctcccagaccggtccccatggaggagatggaagaggagttgaaatgccccgtgtgcggctccttctatcgggagcccatcatcctgccctgctctcacaatttgtgtcaggcgtgcgcccgcaacatcctggtgcagaccccagagtctgaatccccccagagccatcgggccgcgggctccggggtctccgactatgactatctggacctggacaagatgagcctatacagcgaggcggacagcggctatggctcctacggggggttcgccagcgcccccactaccccgtgccagaagtcccccaacggcgtccgcgtgtttcccccggctatgccgccaccggccacccacttgtcaccggccctggccccggtgccccgcaactcctgtatcacctgcccccagtgtcaccgcagcctcatcctggatgaccgggggctccgcggcttccccaagaatcgcgtactggaaggggtaattgaccgctaccagcagagcaaagccgcggccctcaagtgccagctctgcgagaaggcgcccaaggaagccaccgtcatgtgcgaacagtgcgatgtcttctactgcgatccgtgccgcctgcgctgccacccgccccgggggcccctagccaagcaccgcctggtgcccccggcccagggtcgtgtgagccggaggctgagcccacgcaaggtctccacctgcacagaccacgagctggagaaccacagcatgtactgcgtgcaatgcaagatgcccgtgtgctaccagtgcttggaggagggcaaacactccagccacgaagtcaaggctctgggggccatgtggaaactacataagagccagctctcccaggcgctgaacggactgtcagacagggccaaagaagccaaggagtttctggtacagctgcgcaacatggtccagcagatccaggagaacagtgtggagtttgaagcctgtctggtggcccaatgtgatgccctcatcgatgccctcaacagaagaaaagcccagctgctggcccgcgtcaacaaggagcatgagcacaagctgaaggtggttcgagatcagatctctcactgcacagtgaaattgcgccagaccacaggtctcatggagtactgcttggaggtgattaaggaaaatgatcctagtggttttttgcagatttctgacgccctcataagaagagtgcacctgactgaggatcagtggggtaaaggcacactcactccaaggatgaccacggactttgacttgagtctggacaacagccctctgctgcaatccatccaccagctggatttcgtgcaagtgaaagcttcctctccagtcccagcaacccctatcctacagctggaggaatgttgtacccacaacaacagcgctacgttgtcctggaaacagccacctctgtccacggtgcccgccgatggatacattctggagctggatgatggcaacggtggtcaattccgggaggtgtatgtggggaaggagacaatgtgcactgtggatggtcttcacttcaacagcacatacaacgctcgggtcaaggccttcaacaaaacaggagtcagcccgtacagcaagaccctggtcctccaaacgtctgaggtggcctggtttgctttcgaccctggctcggcgcactcggacatcatcctctccaatgacaacctgacagtgacctgtagtagctatgatgaccgggtggtgctagggaagactggcttctccaagggcatccactactgggagctcacggtagatcgctatgacaaccaccctgatcctgcctttggtgtggctcgcatggacgtgatgaaggatgtgatgttaggaaaagacgacaaagcttgggcaatgtatgtggacaataaccggagctggttcatgcacaacaactcgcacaccaacagaactgagggagggatcacaaaaggggccacaattggggtcctcctcgacttcaatagaaaaaacttgacattttttatcaacgatgaacaacaaggtcccatagcatttgataacgtggagggcctcttcttccctgcggtcagcctgaacaggaacgtgcaggtcacgctgcacaccgggctcccagtccccgacttctactccagcagagcatcaatagcctaaggatgtgccgtggaggcgccagctgcctgttcttacctccgcctgcgagagccacagcaaggagctcagccagccgtggtggggtgcagagttggcaggagtgggagaaggaggagagaaaagctggtcctctgcagtctttacacccacagctctgcccttttccctttcaacctctcctccgctgtcatgcctgcttccgcttccatgtccaacaattctaaccaacaaaggacctagacagcccaccaagtcacttggttcccactcccagattttgcttttatttaacttaattttttatgtaggtgagttatattttctttcttttctgatcaggttattggtgacttactggactggcaccgccaggagaaaattctcctgctaactttttttcttaagctttctgtcaaacaatgaggttgtagggggaggtagggaagaatgagctgaatttgtagcatacagcttacctgctagaatgttcttaccctcttacctctcctgtagcgttagctctgcagagctaagctttgggagaatgaatctatcactgagaagttttactactcattgaagcacaaaaatatccgctacacaggttcacatcagggtaggatcgttaggatggctctataattaggataggccagaaccctggccactgtataaaattggaaagtctctaagacacaggcaaaccaggggacttaatgatttggttcgtttatttaataaaagcttttaattgagaacctactattgaccaggcactgttcaagacactagaacattatgttctagacactgtggggacacagtggtgaacagacaggcatggtctctgcccttcggagcttatattccagtaggagaaaaagcaaaaataaaataattataaatggtcatatgtactagaaaggaaatgggcaagggtcaaagagactcatgggcaagatctttcaggcttcctagaatgatgctaaaaatccacacattctggccatagcaccagaaatgtaccaactcaatgccttttcagctgcactatttaattatggtacctgctgccactcatcacagagcccttcttggtagaaatgatgtcagcattcttatttgctgatgctgctatgataccacgccttaaaaattgacagttgaaaaaaaaaagagtgaccagagggcaaaggacccattctcagtaatgggagatcttgagttgcagtccacagcattcacattctcaggataaacatgcttgtctccatatatactatctgtgcctgttatgaatgaaaaatccatccactctgctgccattcacagcctaattttctggagtagtccaaacaatgtttggaaaaacatgggactgtatgtcattactatgactgatagcagaataataatgcatcttacttctatatagagatagacttacataggttacccttgaaattcattagtttgtcataaagttttaggaaaggtaggacccggaaagaagttctaattagttgtctaaatatttttcagtgagccaagaaattcaccatgaaaaaacaagaataacaaatagaagggaagagataggatgggaaagctaacaaattaaagttttggcaaaaaggaatatatgtaaatagctaattatttacttttgtgcttactttatttagattatttctatcagttacaatctttttctagttaagtgtacctaatttatggaatgggtgctatcctgtttatgtgtgtcttggtttttcttggctacagaaaaactgttgcagggcaacactagtttgatatttgatttactctccaatgagactcaatggctgggccgtggtagactcatagttcctcttgttctttattaaattcatcctgctaattagatttctagtgacttgtaacatgtagtttacactgaattgcaattacagatgcatacaactactatactagaaaaaattgtcatttctgatgtgccaataaatgatttttatgagagaataaaaaaaaaaaaaaaaaaaaaa

SEQ ID NO: 600 - DNA, 4061 bp, Homo sapiens
ggtctggaagcagagccggcggagggagcgccggggccctgggctgcaggaggttgcggcggccgcggcagcatggtggtgccggagaaggagcagagctggatccccaagatcttcaagaagaagacctgcacgacgttcatagttgactccacagatccgggagggaccttgtgccagtgtgggcgcccccggaccgcccaccccgcagtggccatggaggatgccttcggggcagccgtggtgaccgtgtgggacagcgatgcacacaccacggagaagcccaccgatgcctacggagagctggacttcacgggggccggccgcaagcacagcaatttcctccggctctctgaccgaacggatccagctgcagtttatagtctggtcacacgcacatggggcttccgtgccccgaacctggtggtgtcagtgctggggggatcggggggccccgtcctccagacctggctgcaggacctgctgcgtcgtgggctggtgcgggctgcccagagcacaggagcctggattgtcactgggggtctgcacacgggcatcggccggcatgttggtgtggctgtacgggaccatcagatggccagcactgggggcaccaaggtggtggccatgggtgtggccccctggggtgtggtccggaatagagacaccctcatcaaccccaagggctcgttccctgcgaggtaccggtggcgcggtgacccggaggacggggtccagtttcccctggactacaactactcggccttcttcctggtggacgacggcacacacggctgcctggggggcgagaaccgcttccgcttgcgcctggagtcctacatctcacagcagaagacgggcgtgggagggactggaattgacatccctgtcctgctcctcctgattgatggtgatgagaagatgttgacgcgaatagagaacgccacccaggctcagctcccatgtctcctcgtggctggctcagggggagctgcggactgcctggcggagaccctggaagacactctggccccagggagtgggggagccaggcaaggcgaagcccgagatcgaatcaggcgtttctttcccaaaggggaccttgaggtcctgcaggcccaggtggagaggattatgacccggaaggagctcctgacagtctattcttctgaggatgggtctgaggaattcgagaccatagttttgaaggcccttgtgaaggcctgtgggagctcggaggcctcagcctacctggatgagctgcgtttggctgtggcttggaaccgcgtggacattgcccagagtgaactctttcggggggacatccaatggcggtccttccatctcgaagcttccctcatggacgccctgctgaatgaccggcctgagttcgtgcgcttgctcatttcccacggcctcagcctgggccacttcctgaccccgatgcgcctggcccaactctacagcgcggcgccctccaactcgctcatccgcaaccttttggaccaggcgtcccacagcgcaggcaccaaagccccagccctaaaagggggagctgcggagctccggccccctgacgtggggcatgtgctgaggatgctgctggggaagatgtgcgcgccgaggtacccctccgggggcgcctgggaccctcacccaggccagggcttcggggagagcatgtatctgctctcggacaaggccacctcgccgctctcgctggatgctggcctcgggcaggccccctggagcgacctgcttctttgggcactgttgctgaacagggcacagatggccatgtacttctgggagatgggttccaatgcagtttcctcagctcttggggcctgtttgctgctccgggtgatggcacgcctggagcctgacgctgaggaggcagcacggaggaaagacctggcgttcaagtttgaggggatgggcgttgacctctttggcgagtgctatcgcagcagtgaggtgagggctgcccgcctcctcctccgtcgctgcccgctctggggggatgccacttgcctccagctggccatgcaagctgacgcccgtgccttctttgcccaggatggggtacagtctctgctgacacagaagtggtggggagatatggccagcactacacccatctgggccctggttctcgccttcttttgccctccactcatctacacccgcctcatcaccttcaggaaatcagaagaggagcccacacgggaggagctagagtttgacatggatagtgtcattaatggggaagggcctgtcgggacggcggacccagccgagaagacgccgctgggggtcccgcgccagtcgggccgtccgggttgctgcgggggccgctgcggggggcgccggtgcctacgccgctggttccacttctggggcgcgccggtgaccatcttcatgggcaacgtggtcagctacctgctgttcctgctgcttttctcgcgggtgctgctcgtggatttccagccggcgccgcccggctccctggagctgctgctctatttctgggctttcacgctgctgtgcgaggaactgcgccagggcctgagcggaggcgggggcagcctcgccagcgggggccccgggcctggccatgcctcactgagccagcgcctgcgcctctacctcgccgacagctggaaccagtgcgacctagtggctctcacctgcttcctcctgggcgtgggctgccggctgaccccgggtttgtaccacctgggccgcactgtcctctgcatcgacttcatggttttcacggtgcggctgcttcacatcttcacggtcaacaaacagctggggcccaagatcgtcatcgtgagcaagatgatgaaggacgtgttcttcttcctcttcttcctcggcgtgtggctggtagcctatggcgtggccacggaggggctcctgaggccacgggacagtgacttcccaagtatcctgcgccgcgtcttctaccgtccctacctgcagatcttcgggcagattccccaggaggacatggacgtggccctcatggagcacagcaactgctcgtcggagcccggcttctgggcacaccctcctggggcccaggcgggcacctgcgtctcccagtatgccaactggctggtggtgctgctcctcgtcatcttcctgctcgtggccaacatcctgctggtcaacttgctcattgccatgttcagttacacattcggcaaagtacagggcaacagcgatctctactggaaggcgcagcgttaccgcctcatccgggaattccactctcggcccgcgctggccccgccctttatcgtcatctcccacttgcgcctcctgctcaggcaattgtgcaggcgaccccggagcccccagccgtcctccccggccctcgagcatttccgggtttacctttctaaggaagccgagcggaagctgctaacgtgggaatcggtgcataaggagaactttctgctggcacgcgctagggacaagcgggagagcgactccgagcgtctgaagcgcacgtcccagaaggtggacttggcactgaaacagctgggacacatccgcgagtacgaacagcgcctgaaagtgctggagcgggaggtccagcagtgtagccgcgtcctggggtgggtggccgaggccctgagccgctctgccttgctgcccccaggtgggccgccaccccctgacctgcctgggtccaaagactgagccctgctggcggacttcaaggagaagcccccacaggggattttgctcctagagtaaggctcatctgggcctcggcccccgcacctggtggccttgtccttgaggtgagccccatgtccatctgggccactgtcaggaccacctttgggagtgtcatccttacaaaccacagcatgcccggctcctcccagaaccagtcccagcctgggaggatcaaggcctggatcccgggccgttatccatctggaggctgcagggtccttggggtaacagggaccacagacccctcaccactcacagattcctcacactggggaaataaagccatttcagaggaaaaaaaa

SEQ ID NO: 601 - DNA, 4117 bp, Homo sapiens
gcagagtgtgcagtatagattcagcgtttgtcgactgactgaatgatagcacaatcccggctgcttcctgttggctgggtttggttggactgggacccgtcagaggaaaaggcaacgccgctgacaaagaacattgccgaaaggttcatgggaggctccggctaacaggttgcacactgggccacagaggatccagcaaggatgaagaaatggagcagcacagacttgggggcagctgcggacccactccaaaaggacacctgcccagaccccctggatggagaccctaactccaggccacctccagccaagccccagctctccacggccaagagccgcacccggctctttgggaagggtgactcggaggaggctttcccggtggattgccctcacgaggaaggtgagctggactcctgcccgaccatcacagtcagccctgttatcaccatccagaggccaggagacggccccaccggtgccaggctgctgtcccaggactctgtcgccgccagcaccgagaagaccctcaggctctatgatcgcaggagtatctttgaagccgttgctcagaataactgccaggatctggagagcctgctgctcttcctgcagaagagcaagaagcacctcacagacaacgagttcaaagaccctgagacagggaagacctgtctgctgaaagccatgctcaacctgcacgacggacagaacaccaccatccccctgctcctggagatcgcgcggcaaacggacagcctgaaggagcttgtcaacgccagctacacggacagctactacaagggccagacagcactgcacatcgccatcgagagacgcaacatggccctggtgaccctcctggtggagaacggagcagacgtccaggctgcggcccatggggacttctttaagaaaaccaaagggcggcctggattctacttcggtgaactgcccctgtccctggccgcgtgcaccaaccagctgggcatcgtgaagttcctgctgcagaactcctggcagacggccgacatcagcgccagggactcggtgggcaacacggtgctgcacgccctggtggaggtggccgacaacacggccgacaacacgaagtttgtgacgagcatgtacaatgagattctgatgctgggggccaaactgcacccgacgctgaagctggaggagctcaccaacaagaagggaatgacgccgctggctctggcagctgggaccgggaagatcggggtcttggcctatattctccagcgggagatccaggagcccgagtgcaggcacctgtccaggaagttcaccgagtgggcctacgggcccgtgcactcctcgctgtacgacctgtcctgcatcgacacctgcgagaagaactcggtgctggaggtgatcgcctacagcagcagcgagacccctaatcgccacgacatgctcttggtggagccgctgaaccgactcctgcaggacaagtgggacagattcgtcaagcgcatcttctacttcaacttcctggtctactgcctgtacatgatcatcttcaccatggctgcctactacaggcccgtggatggcttgcctccctttaagatggaaaaaactggagactatttccgagttactggagagatcctgtctgtgttaggaggagtctacttctttttccgagggattcagtatttcctgcagaggcggccgtcgatgaagaccctgtttgtggacagctacagtgagatgcttttctttctgcagtcactgttcatgctggccaccgtggtgctgtacttcagccacctcaaggagtatgtggcttccatggtattctccctggccttgggctggaccaacatgctctactacacccgcggtttccagcagatgggcatctatgccgtcatgatagagaagatgatcctgagagacctgtgccgtttcatgtttgtctacatcgtcttcttgttcgggttttccacagcggtggtgacgctgattgaagacgggaagaatgactccctgccgtctgagtccacgtcgcacaggtggcgggggcctgcctgcaggccccccgatagctcctacaacagcctgtactccacctgcctggagctgttcaagttcaccatcggcatgggcgacctggagttcactgagaactatgacttcaaggctgtcttcatcatcctgctgctggcctatgtaattctcacctacatcctcctgctcaacatgctcatcgccctcatgggtgagactgtcaacaagatcgcacaggagagcaagaacatctggaagctgcagagagccatcaccatcctggacacggagaagagcttccttaagtgcatgaggaaggccttccgctcaggcaagctgctgcaggtggggtacacacctgatggcaaggacgactaccggtggtgcttcagggtggacgaggtgaactggaccacctggaacaccaacgtgggcatcatcaacgaagacccgggcaactgtgagggcgtcaagcgcaccctgagcttctccctgcggtcaagcagagtttcaggcagacactggaagaactttgccctggtcccccttttaagagaggcaagtgctcgagataggcagtctgctcagcccgaggaagtttatctgcgacagttttcagggtctctgaagccagaggacgctgaggtcttcaagagtcctgccgcttccggggagaagtgaggacgtcacgcagacagcactgtcaacactgggccttaggagaccccgttgccacggggggctgctgagggaacaccagtgctctgtcagcagcctggcctggtctgtgcctgcccagcatgttcccaaatctgtgctggacaagctgtgggaagcgttcttggaagcatggggagtgatgtacatccaaccgtcactgtccccaagtgaatctcctaacagactttcaggtttttactcactttactaaacagtttggatggtcagtctctactgggacatgttaggcccttgttttctttgattttattcttttttttgagacagaatttcactcttctcacccaggctggaatgcagtggcacaattttggctccctgcaacctccgcctcctggattccagcaattctcctgcctcggcttcccaagtagctgggattacaggcacgtgccaccatgtctggctaattttttgtatttttttaatagatatggggtttcgccatgttggccaggctggtctcgaactcctgacctcaggtgatccgcccacctcggcctcccaaagtgctgggattacaggtgtgagcctccacacctggctgttttctttgattttattctttttttttttttctgtgagacagagtttcactcttgttgcccaggctggagtgcagtggtgtgatcttggctcactgcaacttctgcctcccgggttcaagcgattcttctgcttcagtctcccaagtagcttggattacaggtgagcactaccacgcccggctaatttttgtatttttaatagagacggggtttcaccatgttggccaggctggtctcgaactcttgacctcaggtgatctgcccgccttggcctcccaaagtgctgggattacaggtgtgagccgctgcgctcggccttctttgattttatattattaggagcaaaagtaaatgaagcccaggaaaacacctttgggaacaaactcttcctttgatggaaaatgcagaggcccttcctctctgtgccgtgcttgctcctcttacctgcccgggtggtttgggggtgttggtgtttcctccctggagaagatgggggaggctgtcccactcccagctctggcagaatcaagctgttgcagcagtgccttcttcatccttccttacgatcaatcacagtctccagaagatcagctcaattgctgtgcaggttaaaactacagaaccacatcccaaaggtacctggtaagaatgtttgaaagatcttccatttctaggaaccccagtcctgcttctccgcaatggcacatgcttccactccatccatactggcatcctcaaataaacagatatgtatacatataaaaaaaaaaaaaaaaaaaaaaaaaaaa

SEQ ID NO: 602 - DNA, 4443 bp, Homo sapiens
ctgccgctcaccctattccagggacacagtctgcttggctcttctggactgagccatcctcatcaccgagatcctccctgaattcagcccacgacagccaccccggccgttttccttgttctgtgtggggagggaggcagcgcggtggttatcaacctcaccctgcagaggaggcacctgaggcccagagacgaggagggatgggtctaacccagaaccacagatggctctgagccgggggcctgtccaccctcccaggccgacgtcagtggccgcaggactgcctgggccctgctaggcctgctcacctctgaggcctctggggtgagaggttcagtcctggaaacacttcagttctagggggctgggggcagcagcaagttggagttttggggtaccctgcttcacagggcccttggcaaggagggcaggtggggtctaaggacaagcagtccttactttgggagtcaaccccggcgtggtggctgctgcaggttgcacactgggccacagaggatccagcaaggatgaagaaatggagcagcacagacttgggggcagctgcggacccactccaaaaggacacctgcccagaccccctggatggagaccctaactccaggccacctccagccaagccccagctctccacggccaagagccgcacccggctctttgggaagggtgactcggaggaggctttcccggtggattgccctcacgaggaaggtgagctggactcctgcccgaccatcacagtcagccctgttatcaccatccagaggccaggagacggccccaccggtgccaggctgctgtcccaggactctgtcgccgccagcaccgagaagaccctcaggctctatgatcgcaggagtatctttgaagccgttgctcagaataactgccaggatctggagagcctgctgctcttcctgcagaagagcaagaagcacctcacagacaacgagttcaaagaccctgagacagggaagacctgtctgctgaaagccatgctcaacctgcacgacggacagaacaccaccatccccctgctcctggagatcgcgcggcaaacggacagcctgaaggagcttgtcaacgccagctacacggacagctactacaagggccagacagcactgcacatcgccatcgagagacgcaacatggccctggtgaccctcctggtggagaacggagcagacgtccaggctgcggcccatggggacttctttaagaaaaccaaagggcggcctggattctacttcggtgaactgcccctgtccctggccgcgtgcaccaaccagctgggcatcgtgaagttcctgctgcagaactcctggcagacggccgacatcagcgccagggactcggtgggcaacacggtgctgcacgccctggtggaggtggccgacaacacggccgacaacacgaagtttgtgacgagcatgtacaatgagattctgatgctgggggccaaactgcacccgacgctgaagctggaggagctcaccaacaagaagggaatgacgccgctggctctggcagctgggaccgggaagatcggggtcttggcctatattctccagcgggagatccaggagcccgagtgcaggcacctgtccaggaagttcaccgagtgggcctacgggcccgtgcactcctcgctgtacgacctgtcctgcatcgacacctgcgagaagaactcggtgctggaggtgatcgcctacagcagcagcgagacccctaatcgccacgacatgctcttggtggagccgctgaaccgactcctgcaggacaagtgggacagattcgtcaagcgcatcttctacttcaacttcctggtctactgcctgtacatgatcatcttcaccatggctgcctactacaggcccgtggatggcttgcctccctttaagatggaaaaaactggagactatttccgagttactggagagatcctgtctgtgttaggaggagtctacttctttttccgagggattcagtatttcctgcagaggcggccgtcgatgaagaccctgtttgtggacagctacagtgagatgcttttctttctgcagtcactgttcatgctggccaccgtggtgctgtacttcagccacctcaaggagtatgtggcttccatggtattctccctggccttgggctggaccaacatgctctactacacccgcggtttccagcagatgggcatctatgccgtcatgatagagaagatgatcctgagagacctgtgccgtttcatgtttgtctacatcgtcttcttgttcgggttttccacagcggtggtgacgctgattgaagacgggaagaatgactccctgccgtctgagtccacgtcgcacaggtggcgggggcctgcctgcaggccccccgatagctcctacaacagcctgtactccacctgcctggagctgttcaagttcaccatcggcatgggcgacctggagttcactgagaactatgacttcaaggctgtcttcatcatcctgctgctggcctatgtaattctcacctacatcctcctgctcaacatgctcatcgccctcatgggtgagactgtcaacaagatcgcacaggagagcaagaacatctggaagctgcagagagccatcaccatcctggacacggagaagagcttccttaagtgcatgaggaaggccttccgctcaggcaagctgctgcaggtggggtacacacctgatggcaaggacgactaccggtggtgcttcagggtggacgaggtgaactggaccacctggaacaccaacgtgggcatcatcaacgaagacccgggcaactgtgagggcgtcaagcgcaccctgagcttctccctgcggtcaagcagagtttcaggcagacactggaagaactttgccctggtcccccttttaagagaggcaagtgctcgagataggcagtctgctcagcccgaggaagtttatctgcgacagttttcagggtctctgaagccagaggacgctgaggtcttcaagagtcctgccgcttccggggagaagtgaggacgtcacgcagacagcactgtcaacactgggccttaggagaccccgttgccacggggggctgctgagggaacaccagtgctctgtcagcagcctggcctggtctgtgcctgcccagcatgttcccaaatctgtgctggacaagctgtgggaagcgttcttggaagcatggggagtgatgtacatccaaccgtcactgtccccaagtgaatctcctaacagactttcaggtttttactcactttactaaacagtttggatggtcagtctctactgggacatgttaggcccttgttttctttgattttattcttttttttgagacagaatttcactcttctcacccaggctggaatgcagtggcacaattttggctccctgcaacctccgcctcctggattccagcaattctcctgcctcggcttcccaagtagctgggattacaggcacgtgccaccatgtctggctaattttttgtatttttttaatagatatggggtttcgccatgttggccaggctggtctcgaactcctgacctcaggtgatccgcccacctcggcctcccaaagtgctgggattacaggtgtgagcctccacacctggctgttttctttgattttattctttttttttttttctgtgagacagagtttcactcttgttgcccaggctggagtgcagtggtgtgatcttggctcactgcaacttctgcctcccgggttcaagcgattcttctgcttcagtctcccaagtagcttggattacaggtgagcactaccacgcccggctaatttttgtatttttaatagagacggggtttcaccatgttggccaggctggtctcgaactcttgacctcaggtgatctgcccgccttggcctcccaaagtgctgggattacaggtgtgagccgctgcgctcggccttctttgattttatattattaggagcaaaagtaaatgaagcccaggaaaacacctttgggaacaaactcttcctttgatggaaaatgcagaggcccttcctctctgtgccgtgcttgctcctcttacctgcccgggtggtttgggggtgttggtgtttcctccctggagaagatgggggaggctgtcccactcccagctctggcagaatcaagctgttgcagcagtgccttcttcatccttccttacgatcaatcacagtctccagaagatcagctcaattgctgtgcaggttaaaactacagaaccacatcccaaaggtacctggtaagaatgtttgaaagatcttccatttctaggaaccccagtcctgcttctccgcaatggcacatgcttccactccatccatactggcatcctcaaataaacagatatgtatacatataaaaaaaaaaaaaaaaaaaaaaaaaaaa

SEQ ID NO: 603 - DNA, 4074 bp, Homo sapiens
gcccgggaccccacggaggcggggagaccactcttctcccacacgagcccagctctcccttcgagtagcaaccgccttcaagctcacaagcacccgtgggcctggggtgtgcctgcgtctagctggttgcacactgggccacagaggatccagcaaggatgaagaaatggagcagcacagacttgggggcagctgcggacccactccaaaaggacacctgcccagaccccctggatggagaccctaactccaggccacctccagccaagccccagctctccacggccaagagccgcacccggctctttgggaagggtgactcggaggaggctttcccggtggattgccctcacgaggaaggtgagctggactcctgcccgaccatcacagtcagccctgttatcaccatccagaggccaggagacggccccaccggtgccaggctgctgtcccaggactctgtcgccgccagcaccgagaagaccctcaggctctatgatcgcaggagtatctttgaagccgttgctcagaataactgccaggatctggagagcctgctgctcttcctgcagaagagcaagaagcacctcacagacaacgagttcaaagaccctgagacagggaagacctgtctgctgaaagccatgctcaacctgcacgacggacagaacaccaccatccccctgctcctggagatcgcgcggcaaacggacagcctgaaggagcttgtcaacgccagctacacggacagctactacaagggccagacagcactgcacatcgccatcgagagacgcaacatggccctggtgaccctcctggtggagaacggagcagacgtccaggctgcggcccatggggacttctttaagaaaaccaaagggcggcctggattctacttcggtgaactgcccctgtccctggccgcgtgcaccaaccagctgggcatcgtgaagttcctgctgcagaactcctggcagacggccgacatcagcgccagggactcggtgggcaacacggtgctgcacgccctggtggaggtggccgacaacacggccgacaacacgaagtttgtgacgagcatgtacaatgagattctgatgctgggggccaaactgcacccgacgctgaagctggaggagctcaccaacaagaagggaatgacgccgctggctctggcagctgggaccgggaagatcggggtcttggcctatattctccagcgggagatccaggagcccgagtgcaggcacctgtccaggaagttcaccgagtgggcctacgggcccgtgcactcctcgctgtacgacctgtcctgcatcgacacctgcgagaagaactcggtgctggaggtgatcgcctacagcagcagcgagacccctaatcgccacgacatgctcttggtggagccgctgaaccgactcctgcaggacaagtgggacagattcgtcaagcgcatcttctacttcaacttcctggtctactgcctgtacatgatcatcttcaccatggctgcctactacaggcccgtggatggcttgcctccctttaagatggaaaaaactggagactatttccgagttactggagagatcctgtctgtgttaggaggagtctacttctttttccgagggattcagtatttcctgcagaggcggccgtcgatgaagaccctgtttgtggacagctacagtgagatgcttttctttctgcagtcactgttcatgctggccaccgtggtgctgtacttcagccacctcaaggagtatgtggcttccatggtattctccctggccttgggctggaccaacatgctctactacacccgcggtttccagcagatgggcatctatgccgtcatgatagagaagatgatcctgagagacctgtgccgtttcatgtttgtctacatcgtcttcttgttcgggttttccacagcggtggtgacgctgattgaagacgggaagaatgactccctgccgtctgagtccacgtcgcacaggtggcgggggcctgcctgcaggccccccgatagctcctacaacagcctgtactccacctgcctggagctgttcaagttcaccatcggcatgggcgacctggagttcactgagaactatgacttcaaggctgtcttcatcatcctgctgctggcctatgtaattctcacctacatcctcctgctcaacatgctcatcgccctcatgggtgagactgtcaacaagatcgcacaggagagcaagaacatctggaagctgcagagagccatcaccatcctggacacggagaagagcttccttaagtgcatgaggaaggccttccgctcaggcaagctgctgcaggtggggtacacacctgatggcaaggacgactaccggtggtgcttcagggtggacgaggtgaactggaccacctggaacaccaacgtgggcatcatcaacgaagacccgggcaactgtgagggcgtcaagcgcaccctgagcttctccctgcggtcaagcagagtttcaggcagacactggaagaactttgccctggtcccccttttaagagaggcaagtgctcgagataggcagtctgctcagcccgaggaagtttatctgcgacagttttcagggtctctgaagccagaggacgctgaggtcttcaagagtcctgccgcttccggggagaagtgaggacgtcacgcagacagcactgtcaacactgggccttaggagaccccgttgccacggggggctgctgagggaacaccagtgctctgtcagcagcctggcctggtctgtgcctgcccagcatgttcccaaatctgtgctggacaagctgtgggaagcgttcttggaagcatggggagtgatgtacatccaaccgtcactgtccccaagtgaatctcctaacagactttcaggtttttactcactttactaaacagtttggatggtcagtctctactgggacatgttaggcccttgttttctttgattttattcttttttttgagacagaatttcactcttctcacccaggctggaatgcagtggcacaattttggctccctgcaacctccgcctcctggattccagcaattctcctgcctcggcttcccaagtagctgggattacaggcacgtgccaccatgtctggctaattttttgtatttttttaatagatatggggtttcgccatgttggccaggctggtctcgaactcctgacctcaggtgatccgcccacctcggcctcccaaagtgctgggattacaggtgtgagcctccacacctggctgttttctttgattttattctttttttttttttctgtgagacagagtttcactcttgttgcccaggctggagtgcagtggtgtgatcttggctcactgcaacttctgcctcccgggttcaagcgattcttctgcttcagtctcccaagtagcttggattacaggtgagcactaccacgcccggctaatttttgtatttttaatagagacggggtttcaccatgttggccaggctggtctcgaactcttgacctcaggtgatctgcccgccttggcctcccaaagtgctgggattacaggtgtgagccgctgcgctcggccttctttgattttatattattaggagcaaaagtaaatgaagcccaggaaaacacctttgggaacaaactcttcctttgatggaaaatgcagaggcccttcctctctgtgccgtgcttgctcctcttacctgcccgggtggtttgggggtgttggtgtttcctccctggagaagatgggggaggctgtcccactcccagctctggcagaatcaagctgttgcagcagtgccttcttcatccttccttacgatcaatcacagtctccagaagatcagctcaattgctgtgcaggttaaaactacagaaccacatcccaaaggtacctggtaagaatgtttgaaagatcttccatttctaggaaccccagtcctgcttctccgcaatggcacatgcttccactccatccatactggcatcctcaaataaacagatatgtatacatataaaaaaaaaaaaaaaaaaaaaaaaaaaa

SEQ ID NO: 604 - DNA, 2373 bp, Homo sapiens
gggcgaggaaagcgcggccctttccgagtttggtgttttgcagcgaaaggaaatctcgctcttccgaaagtcctccagggcgagagaggaaagggcctaggtactgtgctggggtcgcacagccggccgagacagtgccgggacggggagccaggcttccgagtgcgcccggtcactgactcctccgcgctttcctcgtgcgcctgcagcccttggttcttggaaacgccggcgccttgttcagggctggtggggctggggcgcaaggtgcagctgacaatgcccgagaggagccgcagcctctggtggagttcggtcgggtgtgggggtagtcaaggaaagaagcaaagggaatacctcctctgaaaaatggcagaagcagttttccatgccccaaagaggaaaagaagagtgtatgagacttacgagtctccattgccaatcccttttggtcaggaccatggtcctctgaaagaattcaagatattccgtgctgaaatgattaacaacaatgtgattgtgaggaatgcggaggacattgagcagctctatgggaaaggttattttggaaaaggtattctttcaagaagccgtccaagcttcacaatttcagatcctaaactggttgctaaatggaaagatatgaagacaaacatgcctatcatcacatcaaagaggtatcagcatagtgttgagtgggcagcagagctgatgcgtagacaggggcaggatgagagtacagtgcgcagaatcctcaaggattacacgaaaccgcttgagcatcctcctgtgaaaaggaatgaagaggctcaagtgcatgacaagcttaactctggaatggtttccaacatggaaggcacagcagggggagagagaccttctgtggtaaacggggactctggaaagtcaggtggtgtgggtgatccccgtgagccattaggctgcctgcaggagggctctggctgccacccaacaacagagagctttgagaaaagcgtgcgagaggatgcctcacctctgccccatgtctgttgctgcaaacaagatgctctcatcctccagcgtggccttcatcatgaagacggcagccagcacatcggcctcctgcatcctggggacagagggcctgaccatgagtacgtgctggtcgaggaagcggagtgtgccatgagcgagagggaggctgccccaaatgaggaattggtgcaaagaaacaggttaatatgcagaagaaatccatataggatctttgagtatttgcaactcagcctagaagaggcctttttcttggtctatgctctgggatgtttaagtatttactatgagaaggagcctttaacgatagtgaagctctggaaagctttcactgtagttcagcccacgttcagaaccacctacatggcctaccattactttcgaagcaagggctgggtgcccaaagtgggactcaagtacgggacagatttactgctatatcggaaaggccctccattttaccatgcaagttattctgtcattatcgagctagttgatgaccattttgaaggctctctccgcaggcctctcagttggaagtccctggctgccttgagcagagtttccgttaatgtctctaaggaacttatgctgtgctatttgattaaaccctctactatgactgacaaggaaatggagtcaccagaatgtatgaaaaggattaaagttcaggaggtgattctgagtcgatgggtttcttcacgagagaggagtgaccaagacgatctttaacaattcaacctcaaatttctaatttcaccaacaactatttattgagggctaggtaaaaagttctttttgttgtaatcgtccattaattcataagttttaaagggcatggtgctcccagcaccagaaaactatcagtgtttttaaagataaattacacaagggaggagaaagatccctgtgctaggacaacagattctatacttgcgttggcctctaactcccccatccagagcctcctgcctctggcgtcagttttttccctcatccactcactggggagattggactagaggagtcctgagaggacacttccaacaagagacatttattctctgattttacctgaaaatggtagtagtttacatttatacagtacagtttatgaagcactttcatacgcaggcatctcttgttacctacatctaagctgttcccgaaagagtgttacagaacacaacagtattgtacaatattcgataagcatatcttcactgcacttgttataaaaatgagtggtgaaataatgtttggagacataatgaaagcgattaacatttggcaaaatataataaagcctttttgtaattggtgaaaaaaaaaaaaaaa

SEQ ID NO: 605 - DNA, 1843 bp, Homo sapiens
gggcacgagggcagagccagttcctagcgcagagccgcgcccgccatgagggagatcgtgcacatccaggcgggccagtgcgggaaccagatcggcaccaagttttgggaagtgatcagcgatgagcacggcatcgacccggccggaggctacgtgggagactcggcgctgcagctggagagaatcaacgtctactacaatgagtcatcgtctcagaaatatgtgcccagggccgccctggtggacttagagccaggcaccatggacagcgtgcggtctgggccttttgggcagcttttccggcctgacaacttcatctttggccagacgggtgcagggaacaactgggcgaaagggcactacacggagggcgcggagctggtggacgcagtgctggacgtggtgcggaaggagtgcgagcactgcgactgcctgcagggcttccagctcacgcactcgctgggcggcggcacgggctcaggcatgggcacgctgctcatcagcaagatccgtgaggagttcccggaccgcatcatgaacaccttcagcgtcatgccctcgcccaaggtgtcggacacggtggtggagccctacaatgccacactgtcggtgcaccagctggtggagaatacagacgagacctactgcatcgacaacgaggcgctctatgacatctgcttccgcactctgaagctgacaacgcccacctacggggacctcaaccacctggtgtccgccaccatgagtggggtcaccacctcgctgcgcttcccgggccagctcaatgctgacctgcgcaagctggcggtgaacatggtgcccttcccgcgcctgcacttcttcatgcctggcttcgcgccgctcaccagccgcggcagccagcagtaccgggccctgaccgtgcccgagctcacccagcagatgttcgacgccaggaacatgatggccgcctgcgatccgcgccatggccgctacctgaccgtggccaccgtgttccgcgggcccatgtccatgaaggaggtggacgagcagatgctggccatccagagtaagaacagcagctacttcgtggagtggattcccaacaacgtgaaggtggccgtgtgcgacatcccgccccgcggcctgaagatggcctccaccttcatcggcaacagcacggccatccaggagctgttcaagcgcatctccgagcagttctcagccatgttccggcgcaaggccttcctgcactggttcacgggtgagggcatggatgaaatggagttcaccgaggcggagagcaacatgaacgacctggtatccgagtaccagcagtaccaggatgccaccgccaatgacggggaggaagcttttgaggatgaggaagaggagatcgatggatagtcggaatagagccgccccaactcagatcctacaacacgcaagttccttcttgaaccctggtgcctcctaccctatggccctgaatggtgcactggtttaattgtgttggtgtcggcccctcacaaatgcagccaagtcatgtaattagtcatctggaacaaagactaaaaacagcagagaattgcgggttctacccagtcagaagatcacaccatggagactttctactagaggacttgaaagagaactgaggggccacaaaataaacttcaccttccattaagtgttcaagcatgtctgcaaattaggagggagttagaaacagtctttttcatcctttgtgatgaagcctgaaattgtgccgtgttgccttatatgaatatgcagtatgggactttgaaataatgattcataataaaatactaaacgtgtgtcttcaaaaaaaaaaaaaaaaaaa

SEQ ID NO: 606 - DNA, 1548 bp, Homo sapiens
gcgcctttccaggtcttctcccggtgaaccggatgctctgtcagtctcctcctctgcgtcctcggccgcggcccgggtccctcgcaaagccgctgccatcccggagggcccagccagcgggctcccggaggctggccgggcaggcgtggtgcgcggtaggagctgggcgcgcacggctaccgcgcgtggaggagacactgccctgccgcgatgggggcccggggcgctccttcacgccgtaggcaagcggggcggcggctgcggtacctgcccaccgggagctttcccttccttctcctgctgctgctgctctgcatccagctcgggggaggacagaagaaaaaggagaatcttttagctgaaaaagtagagcagctgatggaatggagttccagacgctcaatcttccgaatgaatggtgataaattccgaaaatttataaaggcaccacctcgaaactattccatgattgttatgttcactgctcttcagcctcagcggcagtgttctgtgtgcaggcaagctaatgaagaatatcaaatactggcgaactcctggcgctattcatctgctttttgtaacaagctcttcttcagtatggtggactatgatgaggggacagacgtttttcagcagctcaacatgaactctgctcctacattcatgcattttcctccaaaaggcagacctaagagagctgatacttttgacctccaaagaattggatttgcagctgagcaactagcaaagtggattgctgacagaacggatgttcatattcgggttttcagaccacccaactactctggtaccattgctttggccctgttagtgtcgcttgttggaggtttgctttatttgagaaggaacaacttggagttcatctataacaagactggttgggccatggtgtctctgtgtatagtctttgctatgacttctggccagatgtggaaccatatccgtggacctccatatgctcataagaacccacacaatggacaagtgagctacattcatgggagcagccaggctcagtttgtggcagaatcacacattattctggtactgaatgccgctatcaccatggggatggttcttctaaatgaagcagcaacttcgaaaggcgatgttggaaaaagacggataatttgcctagtgggattgggcctggtggtcttcttcttcagttttctactttcaatatttcgttccaagtaccacggctatccttatagctttttaattaaatgaagccaagtgggatttgcataaagtgaatgtttaccatgaagataaactgttcctgactttatactattttgaattcattcatttcattgtgatcagctagcttattcttgtgtactttttttaaactgtgggttttcctagtaaatttaatttacagaaatcaatggtagcatttagtaatctacaaaggaaatatcaaagtgtttttcaagcctgttatattcagtgtgtgccacaggattgaaataaatgacaatgtaattatgaaaaaaaaaaaaaaaaaaaaaaaaaaaa

SEQ ID NO: 607 - DNA, 1613 bp, Homo sapiens
gcgcctttccaggtcttctcccggtgaaccggatgctctgtcagtctcctcctctgcgtcctcggccgcggcccgggtccctcgcaaagccgctgccatcccggagggcccagccagcgggctcccggaggctggccgggcaggcgtggtgcgcggtaggagctgggcgcgcacggctaccgcgcgtggaggagacactgccctgccgcgatgggggcccggggcgctccttcacgccgtaggcaagcggggcggcggctgcggtacctgcccaccgggagctttcccttccttctcctgctgctgctgctctgcatccagctcgggggaggacagaagaaaaaggagaatcttttagctgaaaaagtagagcagctgatggaatggagttccagacgctcaatcttccgaatgaatggtgataaattccgaaaatttataaaggcaccacctcgaaactattccatgattgttatgttcactgctcttcagcctcagcggcagtgttctgtgtgcaggcaagctaatgaagaatatcaaatactggcgaactcctggcgctattcatctgctttttgtaacaagctcttcttcagtatggtggactatgatgaggggacagacgtttttcagcagctcaacatgaactctgctcctacattcatgcattttcctccaaaaggcagacctaagagagctgatacttttgacctccaaagaattggatttgcagctgagcaactagcaaagtggattgctgacagaacggatgttcatattcgggttttcagaccacccaactactctggtaccattgctttggccctgttagtgtcgcttgttggaggtttgctttatttgagaaggaacaacttggagttcatctataacaagactggttgggccatggtgtctctgtgtatagtctttgctatgacttctggccagatgtggaaccatatccgtggacctccatatgctcataagaacccacacaatggacaagtgagctacattcatgggagcagccaggctcagtttgtggcagaatcacacattattctggtactgaatgccgctatcaccatggggatggttcttctaaatgaagcagcaacttcgaaaggcgatgttggaaaaagacggataatttgcctagtgggattgggcctggtggtcttcttcttcagttttctactttcaatatttcgttccaagtaccacggctatccttatagtgatctggactttgagtgagaagatgtgatttggaccatggcacttaaaaactctataacctcagctttttaattaaatgaagccaagtgggatttgcataaagtgaatgtttaccatgaagataaactgttcctgactttatactattttgaattcattcatttcattgtgatcagctagcttattcttgtgtactttttttaaactgtgggttttcctagtaaatttaatttacagaaatcaatggtagcatttagtaatctacaaaggaaatatcaaagtgtttttcaagcctgttatattcagtgtgtgccacaggattgaaataaatgacaatgtaattatgaaaaaaaaaaaaaaaaaaaaaaaaaaaa

SEQ ID NO: 608 - DNA, 1381 bp, Homo sapiens
gcacaagccggccttgaaatcagagcctttccagcaactccgagagcgtgtgctcggcgaccgcgggcttggccagcggcgcgcgctcggcgccccggcgcccccagccccacgcgcgccgggcgggcgccatggaggagggctccagctcgcccgtgtcccccgtggacagcctgggcaccagcgaggaggagctcgagaggcagcccaagcgcttcggccggaagcggcgctacagcaagaagtcgagcgaagatggcagcccgaccccgggcaagcgcggcaagaagggcagccccagcgcgcagtccttcgaggagctgcagagccagcgcatcctggccaacgtgcgcgagcgccagcgcacccagtcgctcaacgaggccttcgcggcgctgcgcaagatcatccccacgctgccctctgacaagctgagcaagatccagacgctcaagctggccgccaggtacatagacttcctctaccaggtcctgcagagcgacgagatggacaataagatgaccagctgcagctacgtggcccacgagcgcctcagctacgccttctccgtgtggcgcatggagggcgcgtggtccatgtccgcctcccactagcgccgcgccacccacctccggaccggcgcgccagggctgtccgtcgcgtcggcggcgcaagtggaattgggatgcattcgagtctgtaacttctgaaacctgaacaacctcaggaggcccccacctctgccctccaccagcgtcgagagaagggacagcagtgacatcggacagaagacccgggctcccgtcctcccccaggacggtccccacataggaagggcactcccagccctcttgctggtgacattgtcatggtcatcttgtttctgtttggatttttcttctgggtcttatgtttggggggaggtttattctttctgaaaatgtctagattcaggaacacatttatgaggatttggattttgaatttgtatttccctctaagtgccttttttaatgtctatttttttaataaaacagaaatgcattcttgtacaattctgttgaaactggaccaaggctctcagaagaggacccccgagttccttcccctcccccgagcctctgcatgattgtttcaagtcagcctggaattcttactttcacgccgctattcttttcctttctccgtgattgcttggctagccattttaaaaaaaatattctctgttcagtgtatatgttgcttgtttgttttatttattgagatatttttacaagctaagtgactgcagtgtggctgtgtatcctgctccccacccaggaaaaataaagacgtccgcgcagccatggacaaaaaaaaaaaaaaaaaaaaaaaaaaaaaa

SEQ ID NO: 609 - DNA, 3693 bp, Homo sapiens
cgcgccccgggctcggccgacccggcggggatctaggggtgggcgacttcgcgggaccgtggcgcatgtttcctgggagttactgatcatcttctttgaagaaacatgaagttacactatgttgctgtgcttactctagccatcctgatgttcctgacatggcttccagaatcactgagctgtaacaaagcactctgtgctagtgatgtgagcaaatgcctcattcaggagctctgccagtgccggccgggagaaggcaattgctcctgctgtaaggagtgcatgctgtgtcttggggccctttgggacgagtgctgtgactgtgttggtatgtgtaatcctcgaaattatagtgacacacctccaacttcaaagagcacagtggaggagctgcatgaaccgatcccttctctcttccgggcactcacagaaggagatactcagttgaattggaacatcgtttctttccctgttgcagaagaactttcacatcatgagaatctggtttcatttttagaaactgtgaaccagccacaccaccagaatgtgtctgtccccagcaataatgttcacgcgccttattccagtgacaaagaacacatgtgtactgtggtttattttgatgactgcatgtccatacatcagtgtaaaatatcctgtgagtccatgggagcatccaaatatcgctggtttcataatgcctgctgcgagtgcattggtccagaatgtattgactatggtagtaaaactgtcaaatgtatgaactgcatgttttaaagaagacaaatgcaaaccaaagcaacttagtaaaataataggtataaaaagttattctgtaagtctgttggttgtatcttgtatcagaatcccagtaagttaagttgtaaagactttggaataagtttcttttaaaaatatgacatagccagtgatgtgtttaattatataactgttcttactgattttattgccccctagcaataagccctttcctttgaatacatgtacaactttggtcatatgagaagcaggtgcgcagagaattccttgaaagatctgaggtttttaacataaagtctgatgtggttttcctctagcattccaaaaggtttttgctttgaaagtgttagcagaagcatgttgatgtgaattatgatttcttcatgtgctactgttagcacactgagtttttatagttgcacatcattcctcattgtgccttgttttatccattttataaatagagtagatatttgatataccactctgataactcatataaaaatatcatcataaaaagcttaatttcatcccttttatgttggttttaaaaggtaaatgcttaccatattttataattgagaactcttacatagtagaatccattctataatacatgtgttgacaaagctttagagaaagtttcctattctcttccatttcccctgcccaaagtgctgacataggcagtgatgaagaatctttaccaagattttcagggtgtacctatgaaattgctttaaatgcactgctggtgtaaataattagcaagcaaaagcgtttctgtgacttcaggtaccagcttaaagagcactagggatggggaacgaatgccaaatcagactccacctagagcaccaggaaacagcttgtaccctggtagggaaatggtgtcgctgaaaggggaggctgagccagtgcgagactgaacttgtgcagccttagccaagacaaagcagtgtttttcagcagacggctgatgggacaggaattgaagaagagaattgactcgtatgaacaggacagggtgaaaatgctgggaattataatgggaaacaaaactatctatgttcatattttgtaatatttcatttgttaagtttatatctggatataatgttctttttaaacaagtataatcatatcgtcggaggttaagattatgaaattttaaaatctctattcaagatgatgttcactccaaatacactacagaatttagtcaacattttatataatgtttcaataaatgtttctttcaataaagatactatgtgcccttcatagtaataaaatctcaatcttaaagcatgaatctaaaacataaatatttatattacagactcaattttacaaaattactaattgctctagtgcatatttgaactacaagcaactttttaggaatacctctttatacgtctacatattttagtatataaaaatagataatgctcttggacacattttgtattattcatgatctgaatagtagttagttaaaagatcatttgtaatattatgatcaactgttataaattaaggtcttaataccttttctgctctttcaaataactctaatgaatattcaagatattttagccttttaaaaagttgagatttagctcatggatatattttttggtagggaaacattagggtctccttttcttccttttacctagaatgcctcatttaaaagtgccttgaaaacatttagctccccttcttcatgagcatctgtagagctgaaagtattctggaactttagacagaaagctgaaaggaatctgcagtctcctgctgcagttcaactctgctgtttttcagtcatttcctactgtgagtggagtgatgtttgtgtgtgtgttggcaacatgcctaatgttttcttaatgatgacaacaaatattttaaaactgcatttatcattttttaggtcttcattaaattttaaaatgtaatatctgtttcccaccccctacattaggaggataatttcttaaaccacattgttttaattgatttttcttatcttgatttctttcattagaaactatccctaaatgtaaagatcttttgccttcaaatttggcttattttttctgatttatgagggtttgaaagaaagaattcacctaaaagattccatttccagttttataatgtatttcaggttctgaataacaatatttttccaaattgaaagtaaatattcaagaagttgatagcctggttaaaagttagatcctctattaccattctaagcacattcacttctatattgaagttttggtaaaaattcttttttcttttttaataaaaaattaggttattactttttttataaccagatttttaaagcactaggttttaaatcagtgggtatcataaaagccatatataaaagatcctttcttatagtaagacttgtgcttgttagcaggtttttctgttagtttttcccccataacatttaattattactaaaattgtatttacaatagtggtgccaaatcaaatggtaatttaaataaaatctattctgtgtttatgtagggtggtataaaaaagaggtcttcatttagacatgtgatttctaaaattccagaaagcaaaattgataagatgttagaaatttggaccgttatttataatcagggtagcattaaaatggagaaaagaaagttttctgaaaaaatgcagtaaatataagccacatttctaaagtttatttttatgaaagcttcttttaagattttgaaatctattctgcattcccaagagtttatgtttattgtattttatatgatctacaacatataaaattgtgtatttttctttggttgtccctattaacaaaaaagtattttaataaaaaattgaaatgaaaaaaaaaaaaaaaaaaaaaaa

SEQ ID NO: 610 - DNA, 2970 bp, Homo sapiens
gccgcggcgagagcgcgcccagccccgccgcgatgcccgcgcgcccaggacgcctcctcccgctgctggcccggccggcggccctgactgcgctgctgctgctgctgctgggccatggcggcggcgggcgctggggcgcccgggcccaggaggcggcggcggcggcggcggacgggccccccgcggcagacggcgaggacggacaggacccgcacagcaagcacctgtacacggccgacatgttcacgcacgggatccagagcgccgcgcacttcgtcatgttcttcgcgccctggtgtggacactgccagcggctgcagccgacttggaatgacctgggagacaaatacaacagcatggaagatgccaaagtctatgtggctaaagtggactgcacggcccactccgacgtgtgctccgcccagggggtgcgaggataccccaccttaaagcttttcaagccaggccaagaagctgtgaagtaccagggtcctcgggacttccagacactggaaaactggatgctgcagacactgaacgaggagccagtgacaccagagccggaagtggaaccgcccagtgcccccgagctcaagcaagggctgtatgagctctcagcaagcaactttgagctgcacgttgcacaaggcgaccactttatcaagttcttcgctccgtggtgtggtcactgcaaagccctggctccaacctgggagcagctggctctgggccttgaacattccgaaactgtcaagattggcaaggttgattgtacacagcactatgaactctgctccggaaaccaggttcgtggctatcccactcttctctggttccgagatgggaaaaaggtggatcagtacaagggaaagcgggatttggagtcactgagggagtacgtggagtcgcagctgcagcgcacagagactggagcgacggagaccgtcacgccctcagaggccccggtgctggcagctgagcccgaggctgacaagggcactgtgttggcactcactgaaaataacttcgatgacaccattgcagaaggaataaccttcatcaagttttatgctccatggtgtggtcattgtaagactctggctcctacttgggaggaactctctaaaaaggaattccctggtctggcgggggtcaagatcgccgaagtagactgcactgctgaacggaatatctgcagcaagtattcggtacgaggctaccccacgttattgcttttccgaggagggaagaaagtcagtgagcacagtggaggcagagaccttgactcgttacaccgctttgtcctgagccaagcgaaagacgaactttaggaacacagttggaggtcacctctcctgcccagctcccgcaccctgcgtttaggagttcagtcccacagaggccactgggttcccagtggtggctgttcagaaagcagaacatactaagcgtgaggtatcttctttgtgtgtgtgttttccaagccaacacactctacagattctttattaagttaagtttctctaagtaaatgtgtaactcatggtcactgtgtaaacattttcagtggcgatatatcccctttgaccttctcttgatgaaatttacatggtttcctttgagactaaaatagcgttgagggaaatgaaattgctggactatttgtggctcctgagttgagtgattttggtgaaagaaagcacatccaaagcatagtttacctgcccacgagttctggaaaggtggccttgtggcagtattgacgttcctctgatcttaaggtcacagttgactcaatactgtgttggtccgtagcatggagcagattgaaatgcaaaaacccacacctctggaagataccttcacggccgctgctggagcttctgttgctgtgaatacttctctcagtgtgagaggttagccgtgatgaaagcagcgttacttctgaccgtgcctgagtaagagaatgctgatgccataactttatgtgtcgatacttgtcaaatcagttactgttcaggggatccttctgtttctcacggggtgaaacatgtctttagttcctcatgttaacacgaagccagagcccacatgaactgttggatgtcttccttagaaagggtaggcatggaaaattccacgaggctcattctcagtatctcattaactcattgaaagattccagttgtatttgtcacctggggtgacaagaccagacaggctttcccaggcctgggtatccagggaggctctgcagccctgctgaagggccctaactagagttctagagtttctgattctgtttctcagtagtccttttagaggcttgctatacttggtctgcttcaaggaggtcgaccttctaatgtatgaagaatgggatgcatttgatctcaagaccaaagacagatgtcagtgggctgctctggccctggtgtgcacggctgtggcagctgttgatgccagtgtcctctaactcatgctgtccttgtgattaaacacctctatctcccttgggaataagcacatacaggcttaagctctaagatagataggtgtttgtccttttaccatcgagctacttcccataataaccactttgcatccaacactcttcacccacctcccatacgcaaggggatgtggatacttggcccaaagtaactggtggtaggaatcttagaaacaagaccacttatactgtctgtctgaggcagaagataacagcagcatctcgaccagcctctgccttaaaggaaatctttattaatcacgtatggttcacagataattctttttttaaaaaaacccaacctcctagagaagcacaactgtcaagagtcttgtacacacaacttcagctttgcatcacgagtcttgtattccaagaaaatcaaagtggtacaatttgtttgtttacactatgatactttctaaataaactctttttttttaaaaaaaaaaaaaaaa

SEQ ID NO: 611 - DNA, 3047 bp, Homo sapiens
gggacagagacccctgtgggttgtgaggccgccccgggcggtggcagcaagaagagggactccctggggactgcgggctcagcgcacctcattatcaaggatcttggagaaattcattcaaggcttttggatcacagaccagttattcaaggtgaaactcgttattttgtaaaagaatttgaagaaaaacgtggtcttcgagaaatgcgagttcttgaaaatttgaagaacatgatccatgaaacaaatgaacatactcttcccaaatgtagagacacaatgcgggacagcctcagccaggttctccagagattgcaagcagctaatgactcagtctgtagactccaacagagggaacaggaacgaaaaaaggtgtggacactgccagcggctgcagccgacttggaatgacctgggagacaaatacaacagcatggaagatgccaaagtctatgtggctaaagtggactgcacggcccactccgacgtgtgctccgcccagggggtgcgaggataccccaccttaaagcttttcaagccaggccaagaagctgtgaagtaccagggtcctcgggacttccagacactggaaaactggatgctgcagacactgaacgaggagccagtgacaccagagccggaagtggaaccgcccagtgcccccgagctcaagcaagggctgtatgagctctcagcaagcaactttgagctgcacgttgcacaaggcgaccactttatcaagttcttcgctccgtggtgtggtcactgcaaagccctggctccaacctgggagcagctggctctgggccttgaacattccgaaactgtcaagattggcaaggttgattgtacacagcactatgaactctgctccggaaaccaggttcgtggctatcccactcttctctggttccgagatgggaaaaaggtggatcagtacaagggaaagcgggatttggagtcactgagggagtacgtggagtcgcagctgcagcgcacagagactggagcgacggagaccgtcacgccctcagaggccccggtgctggcagctgagcccgaggctgacaagggcactgtgttggcactcactgaaaataacttcgatgacaccattgcagaaggaataaccttcatcaagttttatgctccatggtgtggtcattgtaagactctggctcctacttgggaggaactctctaaaaaggaattccctggtctggcgggggtcaagatcgccgaagtagactgcactgctgaacggaatatctgcagcaagtattcggtacgaggctaccccacgttattgcttttccgaggagggaagaaagtcagtgagcacagtggaggcagagaccttgactcgttacaccgctttgtcctgagccaagcgaaagacgaactttaggaacacagttggaggtcacctctcctgcccagctcccgcaccctgcgtttaggagttcagtcccacagaggccactgggttcccagtggtggctgttcagaaagcagaacatactaagcgtgaggtatcttctttgtgtgtgtgttttccaagccaacacactctacagattctttattaagttaagtttctctaagtaaatgtgtaactcatggtcactgtgtaaacattttcagtggcgatatatcccctttgaccttctcttgatgaaatttacatggtttcctttgagactaaaatagcgttgagggaaatgaaattgctggactatttgtggctcctgagttgagtgattttggtgaaagaaagcacatccaaagcatagtttacctgcccacgagttctggaaaggtggccttgtggcagtattgacgttcctctgatcttaaggtcacagttgactcaatactgtgttggtccgtagcatggagcagattgaaatgcaaaaacccacacctctggaagataccttcacggccgctgctggagcttctgttgctgtgaatacttctctcagtgtgagaggttagccgtgatgaaagcagcgttacttctgaccgtgcctgagtaagagaatgctgatgccataactttatgtgtcgatacttgtcaaatcagttactgttcaggggatccttctgtttctcacggggtgaaacatgtctttagttcctcatgttaacacgaagccagagcccacatgaactgttggatgtcttccttagaaagggtaggcatggaaaattccacgaggctcattctcagtatctcattaactcattgaaagattccagttgtatttgtcacctggggtgacaagaccagacaggctttcccaggcctgggtatccagggaggctctgcagccctgctgaagggccctaactagagttctagagtttctgattctgtttctcagtagtccttttagaggcttgctatacttggtctgcttcaaggaggtcgaccttctaatgtatgaagaatgggatgcatttgatctcaagaccaaagacagatgtcagtgggctgctctggccctggtgtgcacggctgtggcagctgttgatgccagtgtcctctaactcatgctgtccttgtgattaaacacctctatctcccttgggaataagcacatacaggcttaagctctaagatagataggtgtttgtccttttaccatcgagctacttcccataataaccactttgcatccaacactcttcacccacctcccatacgcaaggggatgtggatacttggcccaaagtaactggtggtaggaatcttagaaacaagaccacttatactgtctgtctgaggcagaagataacagcagcatctcgaccagcctctgccttaaaggaaatctttattaatcacgtatggttcacagataattctttttttaaaaaaacccaacctcctagagaagcacaactgtcaagagtcttgtacacacaacttcagctttgcatcacgagtcttgtattccaagaaaatcaaagtggtacaatttgtttgtttacactatgatactttctaaataaactctttttttttaaaaaaaaaaaaaaaa

SEQ ID NO: 612 - DNA, 580 bp, Homo sapiens
cgctgcgccacatcccaccggcccttacactgtggtgtccagcagcatccggcttcatggggggacttgaaccctgcagcaggctcctgctcctgcctctcctgctggctgtaagtggtctccgtcctgtccaggcccaggcccagagcgattgcagttgctctacggtgagcccgggcgtgctggcagggatcgtgatgggagacctggtgctgacagtgctcattgccctggccgtgtacttcctgggccggctggtccctcgggggcgaggggctgcggaggcgacccggaaacagcgtatcactgagaccgagtcgccttatcaggagctccagggtcagaggtcggatgtctacagcgacctcaacacacagaggccgtattacaaatgagcccgaatcatgacagtcagcaacatgatacctggatccagccattcctgaagcccaccctgcacctcattccaactcctaccgcgatacagacccacagagtgccatccctgagagaccagaccgctccccaatactctcctaaaataaacatgaagcacaaaaacaaaaaaaaaaaaaaaaaa

SEQ ID NO: 613 - DNA, 583 bp, Homo sapiens
cgctgcgccacatcccaccggcccttacactgtggtgtccagcagcatccggcttcatggggggacttgaaccctgcagcaggctcctgctcctgcctctcctgctggctgtaagtggtctccgtcctgtccaggcccaggcccagagcgattgcagttgctctacggtgagcccgggcgtgctggcagggatcgtgatgggagacctggtgctgacagtgctcattgccctggccgtgtacttcctgggccggctggtccctcgggggcgaggggctgcggaggcagcgacccggaaacagcgtatcactgagaccgagtcgccttatcaggagctccagggtcagaggtcggatgtctacagcgacctcaacacacagaggccgtattacaaatgagcccgaatcatgacagtcagcaacatgatacctggatccagccattcctgaagcccaccctgcacctcattccaactcctaccgcgatacagacccacagagtgccatccctgagagaccagaccgctccccaatactctcctaaaataaacatgaagcacaaaaacaaaaaaaaaaaaaaaaaa

SEQ ID NO: 614 - DNA, 1646 bp, Homo sapiens
cactgcgaagcccagctgcgcgcgccttgggattgactgtccacgctcgcccggctcgtccgacgcgccctccgccagccgacagacacagccgcacgcactgccgtgttctccctgcggctcggacacatagtatgaccattaggtgtttcgtctcccacccattttctatggaaaaccaaggggatcgggccatgatagccactggcagctttgaagaacgggacacctttagagaagcttgatcttggaggcctcaccgtgagaccttacaaagccggattccggcagagttcctctatctcgtcttgttgctgattaaaggtgcccctgtctccagtttttctccatctcctgggacgtagcaggaaatcagcatcatggttgggttcaaggccacagatgtgccccctactgccactgtgaagtttcttggggctggcacagctgcctgcatcgcagatctcatcacctttcctctggatactgctaaagtccggttacagatccaaggagaaagtcaggggccagtgcgcgctacagccagcgcccagtaccgcggtgtgatgggcaccattctgaccatggtgcgtactgagggcccccgaagcctctacaatgggctggttgccggcctgcagcgccaaatgagctttgcctctgtccgcatcggcctgtatgattctgtcaaacagttctacaccaagggctctgagcatgccagcattgggagccgcctcctagcaggcagcaccacaggtgccctggctgtggctgtggcccagcccacggatgtggtaaaggtccgattccaagctcaggcccgggctggaggtggtcggagataccaaagcaccgtcaatgcctacaagaccattgcccgagaggaagggttccggggcctctggaaagggacctctcccaatgttgctcgtaatgccattgtcaactgtgctgagctggtgacctatgacctcatcaaggatgccctcctgaaagccaacctcatgacagatgacctcccttgccacttcacttctgcctttggggcaggcttctgcaccactgtcatcgcctcccctgtagacgtggtcaagacgagatacatgaactctgccctgggccagtacagtagcgctggccactgtgcccttaccatgctccagaaggaggggccccgagccttctacaaagggttcatgccctcctttctccgcttgggttcctggaacgtggtgatgttcgtcacctatgagcagctgaaacgagccctcatggctgcctgcacttcccgagaggctcccttctgagcctctcctgctgctgacctgatcacctctggctttgtctctagccgggccatgctttccttttcttccttctttctcttccctccttcccttctctccttccctctttccccacctcttccttccgctcctttacctaccaccttccctctttctacattctcatctactcattgtctcagtgctggtggagttgacatttgacagtgtgggaggcctcgtaccagccaggatcccaagcgtcccgtcccttggaaagttcagccagaatcttcgtcctgcccccgacagcccagcctagcccacttgtcatccataaagcaagctcaaccttgg

SEQ ID NO: 615 - DNA, 2888 bp, Homo sapiens
actagctgtcgctccacaggcgagcagggcaggcgtgcgggcgggtgggtggtggaggctgcgagggtgcacggccggccctgggcaggcggtagccatggagctgtggcgccaatgcacccactggctcatccagtgccgggtgctgccgcccagccaccgcgtgacctgggatggggctcaggtgtgtgaactggcccaggccctccgggatggtgtccttctgtgtcagctgcttaacaacctgctaccccatgccatcaacctgcgtgaggtcaacctgcgcccccagatgtcccagttcctgtgccttaagaacattagaaccttcctgtccacctgctgtgagaagttcggcctcaagcggagcgagctcttcgaagcctttgacctcttcgatgtgcaggattttggcaaggtcatctacaccctgtctgctctgtcctggaccccgatcgcccagaacagggggatcatgcccttccccaccgaggaggagagtgtaggtgatgaagacatctacagtggcctgtccgaccagatcgacgacacggtggaggaggatgaggacctgtatgactgcgtggagaatgaggaggcggaaggcgacgagatctatgaggacctcatgcgctcggagcccgtgtccatgccgcccaagatgacagagtatgacaagcgctgctgctgcctgcgggagatccagcagacggaggagaagtacactgacacgctgggctccatccagcagcatttcttgaagcccctgcaacggttcctgaaacctcaagacattgagatcatctttatcaacattgaggacctgcttcgtgttcatactcacttcctaaaggagatgaaggaagccctgggcacccctggcgcagccaatctctaccaggtcttcatcaaatacaaggagaggttcctcgtctatggccgctactgcagccaggtggagtcagccagcaaacacctggaccgtgtggccgcagcccgggaggacgtgcagatgaagctggaggaatgttctcagagagccaacaacgggaggttcaccctgcgggacctgctgatggtgcctatgcagcgagttctcaaatatcacctccttctccaggagctggtgaaacacacgcaggaggcgatggagaaggagaacctgcggctggccctggatgccatgagggacctggctcagtgcgtgaacgaggtcaagcgagacaacgagacactgcgacagatcaccaatttccagctgtccattgagaacctggaccagtctctggctcactatggccggcccaagatcgacggggaactcaagatcacctcggtggaacggcgctccaagatggacaggtatgccttcctgctcgacaaagctctactcatctgtaagcgcaggggagactcctatgacctcaaggactttgtaaacctgcacagcttccaggttcgggatgactcttcaggagaccgagacaacaagaagtggagccacatgttcctcctgatcgaggaccaaggtgcccagggctatgagctgttcttcaagacaagagaattgaagaagaagtggatggagcagtttgagatggccatctccaacatctatccggagaatgccaccgccaacgggcatgacttccagatgttctcctttgaggagaccacatcctgcaaggcctgtcagatgctgcttagaggtaccttctatcagggctaccgctgccatcggtgccgggcatctgcacacaaggagtgtctggggagggtccctccatgtggccgacatgggcaagatttcccaggaactatgaagaaggacaaactacatcgcagggctcaggacaaaaagaggaatgagctgggtctgcccaagatggaggtgtttcaggaatactacgggcttcctccaccccctggagccattggaccctttctacggctcaaccctggagacattgtggagctcacgaaggctgaggctgaacagaactggtgggagggcagaaatacatctactaatgaaattggctggtttccttgtaacagggtgaagccctatgtccatggccctcctcaggacctgtctgttcatctctggtacgcaggccccatggagcgggcaggggcagagagcatcctggccaaccgctcggacgggactttcttggtgcggcagagggtgaaggatgcagcagaatttgccatcagcattaaatataacgtcgaggtcaagcacattaaaatcatgacagcagaaggactgtaccggatcacagagaaaaaggctttccgggggcttacggagctggtggagttttaccagcagaactctctaaaggattgcttcaagtctctggacaccaccttgcagttccccttcaaggagcctgaaaagagaaccatcagcaggccagcagtgggaagcacaaagtattttggcacagccaaagcccgctatgacttctgcgcccgagaccgatcagagctgtcgctcaaggagggtgacatcatcaagatccttaacaagaagggacagcaaggctggtggcgaggggagatctatggccgggttggctggttccctgccaactacgtggaggaagattattctgaatactgctgagccctggtgccttggcagagagacgagaaactccaggctctgagcccggcgtgggcaggcagcggagccaggggctgtgacagctcccggcgggtggagactttgggatggactggaggagcgcagcgtccagctggcggtgctcccgggatgtgccctgacatggttaatttataacaccccgatttcctcttgggtcccctcaagcagacggggctcaagggggttacatttaataaaaggatgaagatgg

SEQ ID NO: 616 - DNA, 2076 bp, Homo sapiens
cggggaaggggagggaggagggggacgagggctctggcgggtttggaggggctgaacatcgcggggtgttctggtgtcccccgccccgcctctccaaaaagctacaccgacgcggaccgcggcggcgtcctccctcgccctcgcttcacctcgcgggctccgaatgcggggagctcggatgtccggtttcctgtgaggcttttacctgacacccgccgcctttccccggcactggctgggagggcgccctgcaaagttgggaacgcggagccccggacccgctcccgccgcctccggctcgcccagggggggtcgccgggaggagcccgggggagagggaccaggaggggcccgcggcctcgcaggggcgcccgcgcccccacccctgcccccgccagcggaccggtcccccacccccggtccttccaccatgcacttgctgggcttcttctctgtggcgtgttctctgctcgccgctgcgctgctcccgggtcctcgcgaggcgcccgccgccgccgccgccttcgagtccggactcgacctctcggacgcggagcccgacgcgggcgaggccacggcttatgcaagcaaagatctggaggagcagttacggtctgtgtccagtgtagatgaactcatgactgtactctacccagaatattggaaaatgtacaagtgtcagctaaggaaaggaggctggcaacataacagagaacaggccaacctcaactcaaggacagaagagactataaaatttgctgcagcacattataatacagagatcttgaaaagtattgataatgagtggagaaagactcaatgcatgccacgggaggtgtgtatagatgtggggaaggagtttggagtcgcgacaaacaccttctttaaacctccatgtgtgtccgtctacagatgtgggggttgctgcaatagtgaggggctgcagtgcatgaacaccagcacgagctacctcagcaagacgttatttgaaattacagtgcctctctctcaaggccccaaaccagtaacaatcagttttgccaatcacacttcctgccgatgcatgtctaaactggatgtttacagacaagttcattccattattagacgttccctgccagcaacactaccacagtgtcaggcagcgaacaagacctgccccaccaattacatgtggaataatcacatctgcagatgcctggctcaggaagattttatgttttcctcggatgctggagatgactcaacagatggattccatgacatctgtggaccaaacaaggagctggatgaagagacctgtcagtgtgtctgcagagcggggcttcggcctgccagctgtggaccccacaaagaactagacagaaactcatgccagtgtgtctgtaaaaacaaactcttccccagccaatgtggggccaaccgagaatttgatgaaaacacatgccagtgtgtatgtaaaagaacctgccccagaaatcaacccctaaatcctggaaaatgtgcctgtgaatgtacagaaagtccacagaaatgcttgttaaaaggaaagaagttccaccaccaaacatgcagctgttacagacggccatgtacgaaccgccagaaggcttgtgagccaggattttcatatagtgaagaagtgtgtcgttgtgtcccttcatattggaaaagaccacaaatgagctaagattgtactgttttccagttcatcgattttctattatggaaaactgtgttgccacagtagaactgtctgtgaacagagagacccttgtgggtccatgctaacaaagacaaaagtctgtctttcctgaaccatgtggataactttacagaaatggactggagctcatctgcaaaaggcctcttgtaaagactggttttctgccaatgaccaaacagccaagattttcctcttgtgatttctttaaaagaatgactatataatttatttccactaaaaatattgtttctgcattcatttttatagcaacaacaattggtaaaactcactgtgatcaatatttttatatcatgcaaaatatgtttaaaataaaatgaaaattgtattat

SEQ ID NO: 617 - DNA, 3109 bp, Homo sapiens
cattggacttcagcatgactactcagttgccagcttacgtggcaattttgcttttctatgtctcaagagccagctgccaggacactttcattgcagctgtttatgagcatgcagcgatattgcccaatgccaccctaacaccagtgtctcgtgaggaggctttggcattaatgaatcggaatctggacattttggaaggagcgatcacatcagcagcagatcagggtgcgcatattattgtgactccagaagatgctatttatggctggaacttcaacagggactctctctacccatatttggaggacatcccagaccctgaagtaaactggatcccctgtaataatcgtaacagatttggccagaccccagtacaagaaagactcagctgcctggccaagaacaactctatctatgttgtggcaaatattggggacaagaagccatgcgataccagtgatcctcagtgtccccctgatggccgttaccaatacaacactgatgtggtatttgattctcaaggaaaactggtggcacgctaccataagcaaaaccttttcatgggtgaaaatcaattcaatgtacccaaggagcctgagattgtgactttcaataccacctttggaagttttggcattttcacatgctttgatatactcttccatgatcctgctgttaccttggtgaaagatttccacgtggacaccatagtattcccaacagcttggatgaatgttttgccacatttgtcagctgttgaattccactcagcttgggctatgggcatgagggtcaatttccttgcatccaacatacattacccctcaaagaaaatgacaggaagtggcatctatgcacccaattcttcaagagcatttcattatgatatgaagacagaagagggaaaactcctcctctcgcaactggattcccacccatcccattctgcagtggtgaactggacttcctatgccagcagtatagaagcgctctcatcaggaaacaaggaatttaaaggcactgtctttttcgatgaattcacttttgtgaagctcacaggagttgcaggaaattatacagtttgtcagaaagatctctgctgtcatttaagctacaaaatgtctgagaacataccaaatgaagtgtacgctctaggggcatttgacggactgcacactgtggaagggcgctattatctacagatttgtaccctgttgaaatgtaaaacgactaatttaaacacttgcggtgactcagctgaaacagcttctaccaggtttgaaatgttctccctcagtggcactttcggaacccagtatgtctttcctgaggtgttgctgagtgaaaatcagcttgcacctggagaatttcaggtgtcaactgacggacgcttgtttagtctgaagccaacatccggacctgtcttaacagtaactctgtttgggaggttgtatgagaaggactgggcatcaaatgcttcatcaggcctcacagcacaagcaagaataataatgctaatagttatagcacctattgtatgctcattaagttggtagaatattgactttttctcttttttatttgggataatttaaaaaatgatggatgagaaaagaaagattggtccgggttaatattatcctctagtataagtgaattactagtttctctttatttagacaaacacacacacaccagataatataaacttaataaattatctgttaatgtagattttatttaaaaaactatatttgaacattggtctttcttggacgtgagctaattatatcaaataagtatcacaaatcttttacgcagaagaaataaaaactacgggtagaaaacataagaactatcataaaatttacttacaaggaggctgctcttgttaccacttttattatattacgtatcacttattcagctctgctgaaaatttccaatgactttgtttgtttgctcttttagttttttacctaaacaatacattttgattctcttgtgggttgataatgtctccccaaaatttacatgttgaagcacctcagaatgtgactgtatttggagacagggtctttaaagaggtaaaataaggtcattaggatagaccctaattcaatatgactgatgatcataaaagaagaggcgagtagggcacaacaggcacaaagggagaccataaggagacacagaggaaggacaactctttacaagctaagaagagagggcctcagaagaaaccaaccctgccaacaccttgatcttggacttccagcctccaaaactatgagaaataaatttctattgtttaagtcacccagtccatggtactttgttaggcagccctggcaaatgaatcaaagacccattcctgttcctctccccaccactactgttttctactgtaatctgaagcttcaacaaaaggcttacctggtaagaatattcagctggtctgggtcctcaagactccaatagacactcttaaagaaggattgctgatggattgatagtgaaaccattagatcattgaattcctctggaattagaaaaccagagagtcccattttaagaaattagatatttaatatagcattgtgtgttctattttagtaacagcagaatctcttgacattacacaactcagtgaaacaacatcatttaagccaaaatatctcccaactgactgatagactctgagcactaatatcatagtgctgtgatgatggacaattacatagtaccgataacagccatgcactgtgcaaagcatgcccttctgcacaggagagcaaggcacttgcagtagtgatctatgccagcaaaacatcattttgagacaaacatttttgtggcagatgtttttcctaaaaagtactatatcatccaagaaatatttgagtaaaatcccttgttcttttgggtgacattaactgacatttgctttttttcaagacctaatagaaaataagaaagcccataatgtatttagaaacaggaatcctcagagcaattctctgtattctcatataatttcaatgtaaaacagaaaacatattgatgtgttggtgataggcttgaattattaaaaacttcaaaaacaaaa

SEQ ID NO: 618 - DNA, 2660 bp, Homo sapiens
gttccgtccggacggcgtttccacggacgcccaggagacagccggttgctgagccgggagcgctgactggcccggctgggcaggtcttgactcgtctgctgaacaaatcctctgacctcaggccggctgtgaacgtagttcctgagagatagcaaacatgcccaacagtgagcccgcatctctgctggagctgttcaacagcatcgccacacaaggggagctcgtaaggtccctcaaagcgggaaatgcgtcaaaggatgaaattgattctgcagtaaagatgttggtgtcattaaaaatgagctacaaagctgccgcgggggaggattacaaggctgactgtcctccagggaacccagcacctaccagtaatcatggcccagatgccacagaagctgaagaggattttgtggacccatggacagtacagacaagcagtgcaaaaggcatagactacgataagctcattgttcggtttggaagtagtaaaattgacaaagagctaataaaccgaatagagagagccaccggccaaagaccacaccacttcctgcgcagaggcatcttcttctcacacagagatatgaatcaggttcttgatgcctatgaaaataagaagccattttatctgtacacgggccggggcccctcttctgaagcaatgcatgtaggtcacctcattccatttattttcacaaagtggctccaggatgtatttaacgtgcccttggtcatccagatgacggatgacgagaagtatctgtggaaggacctgaccctggaccaggcctatagctatgctgtggagaatgccaaggacatcatcgcctgtggctttgacatcaacaagactttcatattctctgacctggactacatggggatgagctcaggtttctacaaaaatgtggtgaagattcaaaagcatgttaccttcaaccaagtgaaaggcattttcggcttcactgacagcgactgcattgggaagatcagttttcctgccatccaggctgctccctccttcagcaactcattcccacagatcttccgagacaggacggatatccagtgccttatcccatgtgccattgaccaggatccttactttagaatgacaagggacgtcgcccccaggatcggctatcctaaaccagccctgctgcactccaccttcttcccagccctgcagggcgcccagaccaaaatgagtgccagcgaccccaactcctccatcttcctcaccgacacggccaagcagatcaaaaccaaggtcaataagcatgcgttttctggagggagagacaccatcgaggagcacaggcagtttgggggcaactgtgatgtggacgtgtctttcatgtacctgaccttcttcctcgaggacgacgacaagctcgagcagatcaggaaggattacaccagcggagccatgctcaccggtgagctcaagaaggcactcatagaggttctgcagcccttgatcgcagagcaccaggcccggcgcaaggaggtcacggatgagatagtgaaagagttcatgactccccggaagctgtccttcgactttcagtagcactcgttttacatatgcttataaaagaagtgatgtatcagtaatgtatcaataatcccagcccagtcaaagcaccgccacctgtaggcttctgtctcatggtaattactgggcctggcctctgtaagcctgtgtatgttatcaatactgtttcttcctgtgagttccattatttctatctcttatgggcaaagcattgtgggtaattggtgctggctaacattgcatggtcggatagagaagtccagctgtgagtctctccccaaagcagccccacagtggagcctttggctggaagtccatgggccaccctgttcttgtccatggaggactccgagggttccaagtatactcttaagacccactctgtttaaaaatatatattctatgtatgcgtatatggaattgaaatgtcattattgtaacctagaaagtgctttgaaatattgatgtggggaggtttattgagcacaagatgtatttcagcccatgccccctcccaaaaagaaattgataagtaaaagcttcgttatacatttgactaagaaatcacccagctttaaagctgcttttaacaatgaagattgaacagagttcagcaattttgattaaattaagacttgggggtgaaactttccagtttactgaactccagaccatgcatgtagtccactccagaaatcatgctcgcttcccttggcacaccagtgttctcctgccaaatgaccctagaccctctgtcctgcagagtcagggtggcttttcccctgactgtgtccgatgccaaggagtcctggcctccgcagatgcttcattttgacccttggctgcagtggaagtcagcacagagcagtgccctggctgtgtccctggacgggtggacttagctagggagaaagtcgaggcagcagccctcgaggccctcacagatgtctaggcaggcctcatttcatcacgcagcatgtgcaggcctggaagagcaaagccaaatctcagggaagtccttggttgatgtatctgggtctcctctggagcactctgccctcctgtcacccagtagagtaaataaacttccttggctcctgct

SEQ ID NO: 619 - DNA, 2884 bp, Homo sapiens
tcgattctcaagagggtttcattggtctcaacctggccccccaggcaacccacccctgattggacagtctcatcaagaaggttggtcaagagctcaagtgtttctgagaatctgggtgatttataagaaacccttagctgaatgcagggtggggagaacgaaagacaaaagcatcttttttcagaagggaaactgaaagaaagaggggaagagtattaaagaccatttctggctgggcagggcactctcagcagctcaactgcccagcgtgaccagtggccacctctgcagtgtcttccacaacctggtcttgactcgtctgctgaacaaatcctctgacctcaggccggctgtgaacgtagttcctgagagatagcaaacatgcccaacagtgagcccgcatctctgctggagctgttcaacagcatcgccacacaaggggagctcgtaaggtccctcaaagcgggaaatgcgtcaaaggatgaaattgattctgcagtaaagatgttggtgtcattaaaaatgagctacaaagctgccgcgggggaggattacaaggctgactgtcctccagggaacccagcacctaccagtaatcatggcccagatgccacagaagctgaagaggattttgtggacccatggacagtacagacaagcagtgcaaaaggcatagactacgataagctcattgttcggtttggaagtagtaaaattgacaaagagctaataaaccgaatagagagagccaccggccaaagaccacaccacttcctgcgcagaggcatcttcttctcacacagagatatgaatcaggttcttgatgcctatgaaaataagaagccattttatctgtacacgggccggggcccctcttctgaagcaatgcatgtaggtcacctcattccatttattttcacaaagtggctccaggatgtatttaacgtgcccttggtcatccagatgacggatgacgagaagtatctgtggaaggacctgaccctggaccaggcctatagctatgctgtggagaatgccaaggacatcatcgcctgtggctttgacatcaacaagactttcatattctctgacctggactacatggggatgagctcaggtttctacaaaaatgtggtgaagattcaaaagcatgttaccttcaaccaagtgaaaggcattttcggcttcactgacagcgactgcattgggaagatcagttttcctgccatccaggctgctccctccttcagcaactcattcccacagatcttccgagacaggacggatatccagtgccttatcccatgtgccattgaccaggatccttactttagaatgacaagggacgtcgcccccaggatcggctatcctaaaccagccctgctgcactccaccttcttcccagccctgcagggcgcccagaccaaaatgagtgccagcgaccccaactcctccatcttcctcaccgacacggccaagcagatcaaaaccaaggtcaataagcatgcgttttctggagggagagacaccatcgaggagcacaggcagtttgggggcaactgtgatgtggacgtgtctttcatgtacctgaccttcttcctcgaggacgacgacaagctcgagcagatcaggaaggattacaccagcggagccatgctcaccggtgagctcaagaaggcactcatagaggttctgcagcccttgatcgcagagcaccaggcccggcgcaaggaggtcacggatgagatagtgaaagagttcatgactccccggaagctgtccttcgactttcagtagcactcgttttacatatgcttataaaagaagtgatgtatcagtaatgtatcaataatcccagcccagtcaaagcaccgccacctgtaggcttctgtctcatggtaattactgggcctggcctctgtaagcctgtgtatgttatcaatactgtttcttcctgtgagttccattatttctatctcttatgggcaaagcattgtgggtaattggtgctggctaacattgcatggtcggatagagaagtccagctgtgagtctctccccaaagcagccccacagtggagcctttggctggaagtccatgggccaccctgttcttgtccatggaggactccgagggttccaagtatactcttaagacccactctgtttaaaaatatatattctatgtatgcgtatatggaattgaaatgtcattattgtaacctagaaagtgctttgaaatattgatgtggggaggtttattgagcacaagatgtatttcagcccatgccccctcccaaaaagaaattgataagtaaaagcttcgttatacatttgactaagaaatcacccagctttaaagctgcttttaacaatgaagattgaacagagttcagcaattttgattaaattaagacttgggggtgaaactttccagtttactgaactccagaccatgcatgtagtccactccagaaatcatgctcgcttcccttggcacaccagtgttctcctgccaaatgaccctagaccctctgtcctgcagagtcagggtggcttttcccctgactgtgtccgatgccaaggagtcctggcctccgcagatgcttcattttgacccttggctgcagtggaagtcagcacagagcagtgccctggctgtgtccctggacgggtggacttagctagggagaaagtcgaggcagcagccctcgaggccctcacagatgtctaggcaggcctcatttcatcacgcagcatgtgcaggcctggaagagcaaagccaaatctcagggaagtccttggttgatgtatctgggtctcctctggagcactctgccctcctgtcacccagtagagtaaataaacttccttggctcctgct

SEQ ID NO: 620 - DNA, 2488 bp, Homo sapiens
gttccgtccggacggcgtttccacggacgcccaggagacagccggttgctgagccgggagcgctgactggcccggctgggcagggatgaaattgattctgcagtaaagatgttggtgtcattaaaaatgagctacaaagctgccgcgggggaggattacaaggctgactgtcctccagggaacccagcacctaccagtaatcatggcccagatgccacagaagctgaagaggattttgtggacccatggacagtacagacaagcagtgcaaaaggcatagactacgataagctcattgttcggtttggaagtagtaaaattgacaaagagctaataaaccgaatagagagagccaccggccaaagaccacaccacttcctgcgcagaggcatcttcttctcacacagagatatgaatcaggttcttgatgcctatgaaaataagaagccattttatctgtacacgggccggggcccctcttctgaagcaatgcatgtaggtcacctcattccatttattttcacaaagtggctccaggatgtatttaacgtgcccttggtcatccagatgacggatgacgagaagtatctgtggaaggacctgaccctggaccaggcctatagctatgctgtggagaatgccaaggacatcatcgcctgtggctttgacatcaacaagactttcatattctctgacctggactacatggggatgagctcaggtttctacaaaaatgtggtgaagattcaaaagcatgttaccttcaaccaagtgaaaggcattttcggcttcactgacagcgactgcattgggaagatcagttttcctgccatccaggctgctccctccttcagcaactcattcccacagatcttccgagacaggacggatatccagtgccttatcccatgtgccattgaccaggatccttactttagaatgacaagggacgtcgcccccaggatcggctatcctaaaccagccctgctgcactccaccttcttcccagccctgcagggcgcccagaccaaaatgagtgccagcgaccccaactcctccatcttcctcaccgacacggccaagcagatcaaaaccaaggtcaataagcatgcgttttctggagggagagacaccatcgaggagcacaggcagtttgggggcaactgtgatgtggacgtgtctttcatgtacctgaccttcttcctcgaggacgacgacaagctcgagcagatcaggaaggattacaccagcggagccatgctcaccggtgagctcaagaaggcactcatagaggttctgcagcccttgatcgcagagcaccaggcccggcgcaaggaggtcacggatgagatagtgaaagagttcatgactccccggaagctgtccttcgactttcagtagcactcgttttacatatgcttataaaagaagtgatgtatcagtaatgtatcaataatcccagcccagtcaaagcaccgccacctgtaggcttctgtctcatggtaattactgggcctggcctctgtaagcctgtgtatgttatcaatactgtttcttcctgtgagttccattatttctatctcttatgggcaaagcattgtgggtaattggtgctggctaacattgcatggtcggatagagaagtccagctgtgagtctctccccaaagcagccccacagtggagcctttggctggaagtccatgggccaccctgttcttgtccatggaggactccgagggttccaagtatactcttaagacccactctgtttaaaaatatatattctatgtatgcgtatatggaattgaaatgtcattattgtaacctagaaagtgctttgaaatattgatgtggggaggtttattgagcacaagatgtatttcagcccatgccccctcccaaaaagaaattgataagtaaaagcttcgttatacatttgactaagaaatcacccagctttaaagctgcttttaacaatgaagattgaacagagttcagcaattttgattaaattaagacttgggggtgaaactttccagtttactgaactccagaccatgcatgtagtccactccagaaatcatgctcgcttcccttggcacaccagtgttctcctgccaaatgaccctagaccctctgtcctgcagagtcagggtggcttttcccctgactgtgtccgatgccaaggagtcctggcctccgcagatgcttcattttgacccttggctgcagtggaagtcagcacagagcagtgccctggctgtgtccctggacgggtggacttagctagggagaaagtcgaggcagcagccctcgaggccctcacagatgtctaggcaggcctcatttcatcacgcagcatgtgcaggcctggaagagcaaagccaaatctcagggaagtccttggttgatgtatctgggtctcctctggagcactctgccctcctgtcacccagtagagtaaataaacttccttggctcctgct

SEQ ID NO: 621 - DNA, 2712 bp, Homo sapiens
tcgattctcaagagggtttcattggtctcaacctggccccccaggcaacccacccctgattggacagtctcatcaagaaggttggtcaagagctcaagtgtttctgagaatctgggtgatttataagaaacccttagctgaatgcagggtggggagaacgaaagacaaaagcatcttttttcagaagggaaactgaaagaaagaggggaagagtattaaagaccatttctggctgggcagggcactctcagcagctcaactgcccagcgtgaccagtggccacctctgcagtgtcttccacaacctgggatgaaattgattctgcagtaaagatgttggtgtcattaaaaatgagctacaaagctgccgcgggggaggattacaaggctgactgtcctccagggaacccagcacctaccagtaatcatggcccagatgccacagaagctgaagaggattttgtggacccatggacagtacagacaagcagtgcaaaaggcatagactacgataagctcattgttcggtttggaagtagtaaaattgacaaagagctaataaaccgaatagagagagccaccggccaaagaccacaccacttcctgcgcagaggcatcttcttctcacacagagatatgaatcaggttcttgatgcctatgaaaataagaagccattttatctgtacacgggccggggcccctcttctgaagcaatgcatgtaggtcacctcattccatttattttcacaaagtggctccaggatgtatttaacgtgcccttggtcatccagatgacggatgacgagaagtatctgtggaaggacctgaccctggaccaggcctatagctatgctgtggagaatgccaaggacatcatcgcctgtggctttgacatcaacaagactttcatattctctgacctggactacatggggatgagctcaggtttctacaaaaatgtggtgaagattcaaaagcatgttaccttcaaccaagtgaaaggcattttcggcttcactgacagcgactgcattgggaagatcagttttcctgccatccaggctgctccctccttcagcaactcattcccacagatcttccgagacaggacggatatccagtgccttatcccatgtgccattgaccaggatccttactttagaatgacaagggacgtcgcccccaggatcggctatcctaaaccagccctgctgcactccaccttcttcccagccctgcagggcgcccagaccaaaatgagtgccagcgaccccaactcctccatcttcctcaccgacacggccaagcagatcaaaaccaaggtcaataagcatgcgttttctggagggagagacaccatcgaggagcacaggcagtttgggggcaactgtgatgtggacgtgtctttcatgtacctgaccttcttcctcgaggacgacgacaagctcgagcagatcaggaaggattacaccagcggagccatgctcaccggtgagctcaagaaggcactcatagaggttctgcagcccttgatcgcagagcaccaggcccggcgcaaggaggtcacggatgagatagtgaaagagttcatgactccccggaagctgtccttcgactttcagtagcactcgttttacatatgcttataaaagaagtgatgtatcagtaatgtatcaataatcccagcccagtcaaagcaccgccacctgtaggcttctgtctcatggtaattactgggcctggcctctgtaagcctgtgtatgttatcaatactgtttcttcctgtgagttccattatttctatctcttatgggcaaagcattgtgggtaattggtgctggctaacattgcatggtcggatagagaagtccagctgtgagtctctccccaaagcagccccacagtggagcctttggctggaagtccatgggccaccctgttcttgtccatggaggactccgagggttccaagtatactcttaagacccactctgtttaaaaatatatattctatgtatgcgtatatggaattgaaatgtcattattgtaacctagaaagtgctttgaaatattgatgtggggaggtttattgagcacaagatgtatttcagcccatgccccctcccaaaaagaaattgataagtaaaagcttcgttatacatttgactaagaaatcacccagctttaaagctgcttttaacaatgaagattgaacagagttcagcaattttgattaaattaagacttgggggtgaaactttccagtttactgaactccagaccatgcatgtagtccactccagaaatcatgctcgcttcccttggcacaccagtgttctcctgccaaatgaccctagaccctctgtcctgcagagtcagggtggcttttcccctgactgtgtccgatgccaaggagtcctggcctccgcagatgcttcattttgacccttggctgcagtggaagtcagcacagagcagtgccctggctgtgtccctggacgggtggacttagctagggagaaagtcgaggcagcagccctcgaggccctcacagatgtctaggcaggcctcatttcatcacgcagcatgtgcaggcctggaagagcaaagccaaatctcagggaagtccttggttgatgtatctgggtctcctctggagcactctgccctcctgtcacccagtagagtaaataaacttccttggctcctgct

SEQ ID NO: 622 - DNA, 2608 bp, Homo sapiens
actcggagcagcgcgcgccccgcaatcgccgcagccgcccccgccgtcggccgccgcaccccaagcgactgcccaaactaagcctccgtggctgggtacgggagcgctttggggacaaaaattctccctcaactgtggtctgcattccttcggcccgtgggctgatctggggcgggaagtattagcgtctcagttgcgctgcagccggggaggaaggaggaggccgagcctggggcggagtttgggctgactggggctggaccgggcaagacgccgccgctgcccggatgttgcgatggctgatcgggggaggccgagaaccgcagggactggccgagaaatctcctttacagacaataggtgaagaacaaacccagaatccctacactgaactgctagtactgaaggctcatcatgatattgtacgatttctggtacagttagatgactacagatttgcatctgctggtgatgatggaattgtagttgtgtggaatgcccagacaggggaaaaacttttagaactgaatggacacactcaaaagataacagctattattacatttccttccttggaatcttgtgaagagaaaaatcaactcatcttgacagcctctgctgatagaacagttattgtgtgggatggtgatactaccagacaagttcagagaatatcatgcttccagtctactgtaaagtgtttaactgttcttcagagactagatgtttggctttctggtgggaatgacctgtgtgtgtggaaccgaaaattagatctcctgtgtaagactagccacctttctgatacaggtattagtgctttggttgaaatacctaagaactgtgttgtggcagcagttggcaaagaactgataattttcaggttggtagcacccacagaaggatcactagaatgggatattcttgaagttaagcgcctccttgatcaccaggataatattctctcattgattaatgtcaatgatttgagttttgtcaccggctcccacgtcggagagctgatcatctgggatgccctggactggaccatgcaggcctatgaacgcaacttctgggacccatctccacaactggacacccaacaagaaataaaactctgtcaaaaatcaaatgacatttctattcatcatttcacatgtgatgaagagaatgtatttgctgcagttggaaggggtttatacgtgtatagccttcaaatgaagcgtgtgattgcctgccagaaaactgcacatgactccaatgtcctgcacgttgccagacttccaaacaggcagttaatctcatgctcagaagatggcagtgtacgcatttgggagttaagagaaaaacagcagcttgcagctgagcctgtaccaacaggtttttttaacatgtggggatttggaagagtcagcaaacaagccagccaacctgttaaaaagcagcaagaaaatgctacttcatgttcactggagcttattggagatttgattggacactcatcatctgtggagatgtttctatactttgaagatcatggactagtgacgtgctccgctgatcatctcattattttgtggaaaaatggagagcgagaatctggattgcgcagtttaagattatttcaaaaattagaggagaatggtgacttataccttgctgtctagtttaaggaattaaaaatacacatgcatgaaccttgaacatcaaatatcgggtactactctgaaaaccattaatatattgatcacttaaattggtaattttttttgtcagtccataaaattctacatgtttaaattttttgtggacctaccaaccaggaacatgttgcttctcaggtcctagtatatcctccaaagaatataccacaagtttttccatttgactttgagctgctgttgaagtggtgagtgctgtgttttgagcttattttgaacctagatccttgtgaaaggtacaaatagaggtaatagttaagttatggcatttattagaagttttattatttggcttcctttagaattattgtgaagtttaaaaatagcctttctcctgcaaattttcctagtctttagtaactgttagtgttctatatagcacaaacttgaatctctcagccaaaaaagggaacatatatactgtttaagtatggcaagttttctttggtaccaatttgtttagataattttaaaaatgttttttagttctagctactaaaacctgtatgaactcaaatggataggcatcttgtgagggtgtgtttttcccagtgtgaattggcttgaagagccatgggctaaatgggtactagaacaacaactgcccctcatgtacgccaaggatgagctctagatcatttgagaggcacagtgtttccggagtcagggactgcagctgagcgcaactgccccatctgaccactgactcaaatacgaactgcttgagacagacttcttttatgtagttctttgcagtgtccattgagacactataaccagccttgtaacaatatgttttctccttttggtgctaaaaaataaaaatattagaaagtaaaaaaaaaaaaaaaaaaaaaaaaaaaaaaaaaaaaaaaaaaaaaaaaaaa

SEQ ID NO: 623 - DNA, 3871 bp, Homo sapiens
ctcgtgccgccagccaaccgcgcggccgcttgttgagccagggctccaccgtcgccatgacgcccggcaaacattccggagcctcggcccgagccgctaacgcaggagcttgggggtacagggacttcagaggcggccaaaaaaaggggtggtggaccactccccagctggtcgccaccatgccagtctctccggcaggcagtcacaagcagcagaacttcgggttgaacaatgccacacaaccaaagaagtctattagcttttttgctacaatgaaagcaacttcagtgaaaggatatactggtgcaaatcaaagcagaatggctgtgtccaaaaccgtgcttattccacctgaactgaaaactgtagaaaaaccaaatcccaatataaagacaacacaggtatttgacataaatggaactgatgttactccccgacctctttaccatccagatccacttactggtacagcaaaaccaagtaaactcttgacatcacaagaaggatcacttggatcagaatttatatcttcctatagcctttatcagaatacaataaatcctagtacgttagggcagtttacaaggtcagttttaggaagcagtacagtttctaagtcaagtgtatcagcaagtgaatcaatagcagaagacctggaagaaccatcctataaacgggaaagattgactagtttcacagatttgcaagttataagggcagcacctgaaaaaattgtaacaaaagaagacctggagaagaatatagagataatactcacagagacagaaacactgagattttttgacttgcccacagtcatggtctctgtagaatctgaagaagctgagaaagtaactcagagaaacaagaattatgaagtcctttgtagaaacagattaggcaatgacctatatgttgaaaggatgatgcagactttcaatggagcaccaaagaataaagatgttcaatgtgataaaatcataatggaagataaaggcataatgtccactgcctgggatttgtatgattcttacaatgctatggaacttgtatctttatcagtaaaacaatctgtggttgagtcaagtagtaaagcaaatgtacttcctaaagatcaggaccaaagattgccagggagcactacagaaaaaaatagtgaaactagttctctaatggacatagaaaatgtaattctggcaaaaatccatgaagatgaggaagaccactcagatgcaatattaaaatctgacaaatttcatcaggacttattttttatggaacgggttctgatggaaaatatatttcagcccaaacttgcagcttatcgtcagcttcctgttttaaaagaacctgaacctgaagagcctgaagatgttttagaaagtgcaaaacatgaagaggtagaggaagaatctaagaaggaggaggaagaagaaatacatgcagaagaatcaacaatacccgccaacttggaacgactttggtctttttcctgtgacttaaccaaaggcctcaatgtgagcagccttgcctggaataaaacaaatccagatcttttggctgttggctatgggcactttggatttaaagagcaaaaaagaggactggcttgctgctggtcaataaagaatcccatgtggccagaacgtatttatcagagtccatatggagttactgctgtggatttttcaattggagcacctaaccttttagccgttggctatcacaatggcacaattgcaatttacaatgtacggagcaacagtaatgttccagttctggatagtagtgaatcacctcaaaaacatttgggacctgtatggcaactacagtggatagaacaagatcgaggaacaacaggagatggcaaaagagaaatactagtttctatatcagcagatggaagaatctccaaatgggttatacgaaaaggactagactgttatgatttgatgcgattaaagagaactacagctgccagtaacaaaaaaggaggggaaaaggaaaagaaagatgaagctttgatatctcgacaggctcctggaatgtgttttgcttttcatcccaaggacacaaatatctatttggctggcactgaagaaggtcatattcacaaatgttcttgttcatataatgaacaatacttagatacctacagaggacataagggtccagtgtataaagtgacatggaatccattttgtcatgatgtatttttaagctgttctgcagattggggtgttattatatggcaacaggagaatgtcaagccatctttgagtttttatccagctacttctgttgtttacgacgttgcctggtctccaaaatcatcctatatatttgcagctgcaaatgagaacagggtggagatttgggaccttcatatcagcactttggaccctctgattgtgaatactgctaaccctggaatcaagttcacaaccattctctttgccaaacaaacagattgccttctggtaggagacagtgatggacaggtttctgtgtatgaactgagaaatatgcctactgttttggaaactggccggggagatataatggatactttgcttggatccaagtcaaaccaatcagcataattcatcattcctaatatttttcttgtagttgttttaaaaaaggaattaacatccaatattctgtattacatactgtacaccagattttgatttcagaaaacaatatttgatgtataacttccacttaatttaaatttaataaacttttatttcagagatatttgattagtttacaatctaagagttattcttaagagtttcagtggaattttcttaatttttctaaagatattcctactctcttgatcatattctaagtacatatgagtacatgtacattcttatacaatgtctaaatgggttagaaaattattatacctatagaagcgaaacttggaaattaatagaatcacttaaaccaaaatctttataagacacaattctattgattttaaagcttctgctttccaggctctgttttccagagtttataattacgtagtttttagtagatgaaaataatggattcttgtacctaacattttatcctcttagatctaagagccgaagctatagaactttgttagactatttggcaagcaaaatatatgacagtaaatatcagaattttatggtttgaccagcgcttatcacattcccaattcagtgagaaaaattcatctgggacacaacagggtactcttctctgtttgcccagaatcagctctggattttaagcccagacttcagtggacccagatagaaaatataaagtctctgatctataggccacatcaggatgttattttatgaagagttctagagcaaggttgcggaaatcggggtggagatggggagcagtgactcctccaaatattcattgctaacaggccattctatgcagtttgttttaacaaatcctgggttaaactgaggccacaggacatgatgggctgttctataaagcattctaagtggagaggagacgatagggcatatgaaattcactaaactctctggaaaaaaaatatgtatatattaaaaaccaagactggaatcagtgcaacagtgggaactaccttttacaagtatccattgcttcataaactccatttgtttggaccaatcccttaaacaaaagcaaggcaaattttacatggatttagagcctaggtcaggttattaggattataaattttccactggtatgtcattgtgattatctttgtttttgtctttctgaaagattggattttctataacaccttgtgtaagaaaataaaaaacttgatctaactgaaaaaaaaaaaaaaaaaaaaaaaaaaaaa

SEQ ID NO: 624 - DNA, 5855 bp, Homo sapiens
agttgcctgcgcgccctcgccggaccggcggctccctagttgcgccccgaccaggccctgcccttgctgccggctcgcgcgcgtccgcgccccctccattcctgggcgcatcccagctctgccccaactcgggagtccaggcccgggcgccagtgcccgcttcagctccggttcactgcgcccgccggacgcgcgccggaggactccgcagccctgctcctgaccgtccccccaggcttaacccggtcgctccgctcggattcctcggctgcgctcgctcgggtggcgacttcctccccgcgccccctccccctcgccatgaagaagtccattggaatattaagcccaggagttgctttggggatggctggaagtgcaatgtcttccaagttcttcctagtggctttggccatatttttctccttcgcccaggttgtaattgaagccaattcttggtggtcgctaggtatgaataaccctgttcagatgtcagaagtatatattataggagcacagcctctctgcagccaactggcaggactttctcaaggacagaagaaactgtgccacttgtatcaggaccacatgcagtacatcggagaaggcgcgaagacaggcatcaaagaatgccagtatcaattccgacatcgaaggtggaactgcagcactgtggataacacctctgtttttggcagggtgatgcagataggcagccgcgagacggccttcacatacgcggtgagcgcagcaggggtggtgaacgccatgagccgggcgtgccgcgagggcgagctgtccacctgcggctgcagccgcgccgcgcgccccaaggacctgccgcgggactggctctggggcggctgcggcgacaacatcgactatggctaccgctttgccaaggagttcgtggacgcccgcgagcgggagcgcatccacgccaagggctcctacgagagtgctcgcatcctcatgaacctgcacaacaacgaggccggccgcaggacggtgtacaacctggctgatgtggcctgcaagtgccatggggtgtccggctcatgtagcctgaagacatgctggctgcagctggcagacttccgcaaggtgggtgatgccctgaaggagaagtacgacagcgcggcggccatgcggctcaacagccggggcaagttggtacaggtcaacagccgcttcaactcgcccaccacacaagacctggtctacatcgaccccagccctgactactgcgtgcgcaatgagagcaccggctcgctgggcacgcagggccgcctgtgcaacaagacgtcggagggcatggatggctgcgagctcatgtgctgcggccgtggctacgaccagttcaagaccgtgcagacggagcgctgccactgcaagttccactggtgctgctacgtcaagtgcaagaagtgcacggagatcgtggaccagtttgtgtgcaagtagtgggtgccacccagcactcagccccgctcccaggacccgcttatttatagaaagtacagtgattctggtttttggtttttagaaatattttttatttttccccaagaattgcaaccggaaccattttttttcctgttaccatctaagaactctgtggtttattattaatattataattattatttggcaataatgggggtgggaaccaagaaaaatatttattttgtggatctttgaaaaggtaatacaagacttcttttgatagtatagaatgaaggggaaataacacataccctaacttagctgtgtggacatggtacacatccagaaggtaaagaaatacattttctttttctcaaatatgccatcatatgggatgggtaggttccagttgaaagagggtggtagaaatctattcacaattcagcttctatgaccaaaatgagttgtaaattctctggtgcaagataaaaggtcttgggaaaacaaaacaaaacaaaacaaacctcccttccccagcagggctgctagcttgctttctgcattttcaaaatgataatttacaatggaaggacaagaatgtcatattctcaaggaaaaaaggtatatcacatgtctcattctcctcaaatattccatttgcagacagaccgtcatattctaatagctcatgaaatttgggcagcagggaggaaagtccccagaaattaaaaaatttaaaactcttatgtcaagatgttgatttgaagctgttataagaattaggattccagattgtaaaaagatccccaaatgattctggacactagatttttttgtttggggaggttggcttgaacataaatgaaaatatcctgttattttcttagggatacttggttagtaaattataatagtaaaaataatacatgaatcccattcacaggttctcagcccaagcaacaaggtaattgcgtgccattcagcactgcaccagagcagacaacctatttgaggaaaaacagtgaaatccaccttcctcttcacactgagccctctctgattcctccgtgttgtgatgtgatgctggccacgtttccaaacggcagctccactgggtcccctttggttgtaggacaggaaatgaaacattaggagctctgcttggaaaacagttcactacttagggatttttgtttcctaaaacttttattttgaggagcagtagttttctatgttttaatgacagaacttggctaatggaattcacagaggtgttgcagcgtatcactgttatgatcctgtgtttagattatccactcatgcttctcctattgtactgcaggtgtaccttaaaactgttcccagtgtacttgaacagttgcatttataaggggggaaatgtggtttaatggtgcctgatatctcaaagtcttttgtacataacatatatatatatatacatatatataaatataaatataaatatatctcattgcagccagtgatttagatttacagtttactctggggttatttctctgtctagagcattgttgtccttcactgcagtccagttgggattattccaaaagttttttgagtcttgagcttgggctgtggccctgctgtgatcataccttgagcacgacgaagcaaccttgtttctgaggaagcttgagttctgactcactgaaatgcgtgttgggttgaagatatcttttttcttttctgcctcacccctttgtctccaacctccatttctgttcactttgtggagagggcattacttgttcgttatagacatggacgttaagagatattcaaaactcagaagcatcagcaatgtttctcttttcttagttcattctgcagaatggaaacccatgcctattagaaatgacagtacttattaattgagtccctaaggaatattcagcccactacatagatagcttttttttttttttttttaataaggacacctctttccaaacagtgccatcaaatatgttcttatctcagacttacgttgttttaaaagtttggaaagatacacatctttcataccccccttaggcaggttggctttcatatcacctcagccaactgtggctcttaatttattgcataatgatattcacatcccctcagttgcagtgaattgtgagcaaaagatcttgaaagcaaaaagcactaattagtttaaaatgtcacttttttggtttttattatacaaaaaccatgaagtactttttttatttgctaaatcagattgttcctttttagtgactcatgtttatgaagagagttgagtttaacaatcctagcttttaaaagaaactatttaatgtaaaatattctacatgtcattcagatattatgtatatcttctagcctttattctgtacttttaatgtacatatttctgtcttgcgtgatttgtatatttcactggtttaaaaaacaaacatcgaaaggcttatgccaaatggaagatagaatataaaataaaacgttacttgtatattggtaagtggtttcaattgtccttcagataattcatgtggagatttttggagaaaccatgacggatagtttaggatgactacatgtcaaagtaataaaagagtggtgaattttaccaaaaccaagctatttggaagcttcaaaaggtttctatatgtaatggaacaaaaggggaattctcttttcctatatatgttccttacaaaaaaaaaaaaaaaagaaatcaagcagatggcttaaagctggttataggattgctcacattcttttagcattatgcatgtaacttaattgttttagagcgtgttgctgttgtaacatcccagagaagaatgaaaaggcacatgcttttatccgtgaccagatttttagtccaaaaaaatgtatttttttgtgtgtttaccactgcaactattgcacctctctatttgaatttactgtggaccatgtgtggtgtctctatgccctttgaaagcagtttttataaaaagaaagcccgggtctgcagagaatgaaaactggttggaaactaaaggttcattgtgttaagtgcaattaatacaagttattgtgcttttcaaaaatgtacacggaaatctggacagtgctgcacagattgatacattagcctttgctttttctctttccggataaccttgtaacatattgaaaccttttaaggatgccaagaatgcattattccacaaaaaaacagcagaccaacatatagagtgtttaaaatagcatttctgggcaaattcaaactcttgtggttctaggactcacatctgtttcagtttttcctcagttgtatattgaccagtgttctttattgcaaaaacatatacccgatttagcagtgtcagcgtattttttcttctcatcctggagcgtattcaagatcttcccaatacaagaaaattaataaaaaatttatatataggcagcagcaaaagagccatgttcaaaatagtcattatgggctcaaatagaaagaagacttttaagttttaatccagtttatctgttgagttctgtgagctactgacctcctgagactggcactgtgtaagttttagttgcctaccctagctcttttctcgtacaattttgccaataccaagtttcaatttgtttttacaaaacattattcaagccactagaattatcaaatatgacgctatagcagagtaaatactctgaataagagaccggtactagctaactccaagagatcgttagcagcatcagtccacaaacacttagtggcccacaatatatagagagatagaaaaggtagttataacttgaagcatgtatttaatgcaaataggcacgaaggcacaggtctaaaatactacattgtcactgtaagctatacttttaaaatatttattttttttaaagtattttctagtcttttctctctctgtggaatggtgaaagagagatgccgtgttttgaaagtaagatgatgaaatgaatttttaattcaagaaacattcagaaacataggaattaaaacttagagaaatgatctaatttccctgttcacacaaactttacactttaatctgatgattggatattttattttagtgaaacatcatcttgttagctaactttaaaaaatggatgtagaatgattaaaggttggtatgatttttttttaatgtatcagtttgaacctagaatattgaattaaaatgctgtctcagtattttaaaagcaaaaaaggaatggaggaaaattgcatcttagaccatttttatatgcagtgtacaatttgctgggctagaaatgagataaagattatttatttttgttcatatcttgtacttttctattaaaatcattttatgaaatccaaaaaaaaaaaaaaaaaa

SEQ ID NO: 625 - DNA, 1836 bp, Homo sapiens
ggcgctgggcggctgcggcgcgcggtgcgcggtgcgtagtctggagctatggtggtggtggcagccgcgccgaacccggccgacgggacccctaaagttctgcttctgtcggggcagcccgcctccgccgccggagccccggccggccaggccctgccgctcatggtgccagcccagagaggggccagcccggaggcagcgagcggggggctgccccaggcgcgcaagcgacagcgcctcacgcacctgagccccgaggagaaggcgctgaggaggaaactgaaaaacagagtagcagctcagactgccagagatcgaaagaaggctcgaatgagtgagctggaacagcaagtggtagatttagaagaagagaaccaaaaacttttgctagaaaatcagcttttacgagagaaaactcatggccttgtagttgagaaccaggagttaagacagcgcttggggatggatgccctggttgctgaagaggaggcggaagccaaggggaatgaagtgaggccagtggccgggtctgctgagtccgcagcactcagactacgtgcacctctgcagcaggtgcaggcccagttgtcacccctccagaacatctccccatggattctggcggtattgactcttcagattcagagtctgatatcctgttgggcattctggacaacttggacccagtcatgttcttcaaatgcccttccccagagcctgccagcctggaggagctcccagaggtctacccagaaggacccagttccttaccagcctccctttctctgtcagtggggacgtcatcagccaagctggaagccattaatgaactaattcgttttgaccacatatataccaagcccctagtcttagagataccctctgagacagagagccaagctaatgtggtagtgaaaatcgaggaagcacctctcagcccctcagagaatgatcaccctgaattcattgtctcagtgaaggaagaacctgtagaagatgacctcgttccggagctgggtatctcaaatctgctttcatccagccactgcccaaagccatcttcctgcctactggatgcttacagtgactgtggatacgggggttccctttccccattcagtgacatgtcctctctgcttggtgtaaaccattcttgggaggacacttttgccaatgaactctttccccagctgattagtgtctaaggaatgatccaatactgttgcccttttccttgactattacactgcctggaggatagcagagaagcctgtctgtacttcattcaaaaagccaaaatagagagtatacagtcctagagaattcctctatttgttcagatctcatagatgacccccaggtattgtcttttgacatccagcagtccaaggtattgagacatattactggaagtaagaaatattactataattgagaactacagcttttaagattgtacttttatcttaaaagggtggtagttttccctaaaatacttattatgtaagggtcattagacaaatgtcttgaagtagacatggaatttatgaatggttctttatcatttctcttccccctttttggcatcctggcttgcctccagttttaggtcctttagtttgcttctgtaagcaacgggaacacctgctgagggggctctttccctcatgtatacttcaagtaagatcaagaatcttttgtgaaattatagaaatttactatgtaaatgcttgatggaattttttcctgctagtgtagcttctgaaaggtgctttctccatttatttaaaactacccatgcaattaaaaggtacaatgcaaaaaaaaaaaaaaaaa

SEQ ID NO: 626 - DNA, 3925 bp, Homo sapiens
aaaggagggctctcctccggtgtggaggcatcatggccgctaaatcagacgggaggctgaaaatgaagaaaagcagcgacgtggcgttcaccccgctgcagaactcggaccactcgggctcggtgcagggattggctccaggcttgccgtcggggtcgggagccgaggacgaggaggcggccgggggcggctgctgcccggacggcggcggctgctcgcgctgctgctgctgctgcgccgggagtggcggctccgcgggctcgggcggctccggcggcgtcgccggcccgggcggcggcggggcgggctcggctgcgctgtgcctgcgcctgggcagggagcagcggcgctactcactgtgggactgcctctggatcctggccgccgtggccgtgtacttcgcggacgtgggcacagacgtctggctcgccgtggactactacctgcgcggccagcgctggtggttcgggctcacgctcttcttcgtggtgctcggctctctgtcggtgcaagtgttcagcttccgctggtttgtgcacgatttcagcaccgaggacagcgccacggccgctgctgcctccagctgcccgcagcctggagccgattgcaagacggtggtcggcggtgggtctgcagccggggaaggcgaggctcgtccttccacgccgcaaaggcaagcatctaacgccagcaagagcaacatcgccgcggccaacagcggcagcaacagcagcggggctacccgggccagtggcaagcacaggtctgcgtcctgctccttctgcatctggctcctgcagtcactcatccacatcttgcagctcgggcaaatctggagatatttccacacaatatacttaggtattcgaagccgacagagtggggagaatgacagatggaggttttactggaaaatggtatatgagtatgcggatgtgagtatgctgcatttgctagccacctttctggaaagtgctccacagctggtcctgcagctctgcattatcgtacagactcatagcttacaggccctccaaggtttcacagcggcagcttccctcgtgtccctggcctgggccttggcctcctaccagaaggccctccgggactctcgagatgacaagaagcccatcagctacatggccgtcatcatccagttctgctggcacttcttcaccatcgccgccagggtcatcacgtttgccctctttgcctcggttttccagctgtactttgggatcttcatcgtccttcactggtgcatcatgaccttctggatcgtccactgtgagacagaattctgtatcaccaaatgggaagagattgtgttcgacatggtggtggggattatctatatcttcagttggttcaatgtcaaggaaggcaggacacgctgcaggctattcatttactattttgtgatccttttggaaaatacagccttgagtgccctctggtacctctacaaggctccccagattgcagacgcatttgccattccagcgctgtgtgtggtgttcagcagctttttaactggcgttgtttttatgctgatgtattatgccttctttcatcccaatggacccagattcgggcagtcaccaagttgtgcttgtgaggacccagccgctgccttcactttgcccccagacgtggccacaagcaccctacggtccatctccaacaaccgcagtgttgtcagcgaccgcgatcagaaattcgcagagcgggatgggtgtgtacctgtctttcaagtgaggcccactgccccatccaccccatcatctcgcccaccacggattgaagaatcagtcattaaaattgacttgttcaggaataggtacccagcatgggagagacatgttttggaccgaagcctccgaaaggctattttagcttttgaatgttccccatctcctccaaggctgcagtacaaagatgatgcccttattcaggagcggttggagtacgaaaccactttataaagcaaaaggagttgcaggacccacaacatccagatgaaggggtgacagcagggctgtggccataatgacacttcatcctagagcagggcagtgagccgtgaagttcctagtgggaccgtcatcaccattatcatttgatcctgtcggctgggggcggctggtctccttccaaagcagctgcacccgagagtctctgactccacctgaaagaatgacgctggcttaataggactctccattgctaccaaactcctcctgcacggtcttgggtgcacccaccagagggtactactattatggaaaaattttgcctccaatcattagggtgtcttgatggcgttaactgatctttccataaaaatagattcagtcatacacacatacacacactaacacacataagttacaccagtcctctgtcaaaaaagcttaggtgacttttcttgatgcaaagctctgattcccacaggaatataaaaacaaagaaagagggaaacatccctcgagaaaaaaaatagtattgcttagaaaagaaaccattttctcatttggaaatccataccatgtgtgaaaatcctatccaacggacagcaaacccaaatgttgtctacacatgtgttagcattgatggagtggttcattttctacacatttcaggatttgttttatattttaaattttcagttgcgaacatcctttttgacagaaatcctatgcagcccatgtacggctttcaacaagaccaaggagctcaataacttcatgatgtaaattaaatagtaatcatgattcagtattcaattgcaaaaatgtaacaggtacacaaagaggaagtggggaaaaaggcaaaatgagagtctgattcccaggcatgtgcagcgcccattgggacataacggcagtgcggcgcgagccagaggaatgggctggaaccggatctgtttccagacgcagaatgagtggctctgtgtgaccataggcagatgctgactctggaagactccgtgccactcctttctagtgccaaacaccatccaaccacaggactgacgtggaagccccaaacaactgagaatgagtggcatgagccccctaaaagcaggcgagagaacgagcaatcaagttctccactgtgtacagacttttcctccccccaatccaaggtcaaagtgatgtgtcttttagaggctttgggacactttttagtaagtatgagcagacaaatgcaatgaatatgctatgaaaaaacccttctgaactgagagagggcttatcactatatccagctaagatttgtatttgaatcatctgtaaagtcgcactcttacaacaagcttctgggttttaaatacctccgtacagcaagtaaacgttccccgctttctgttctcagtgtcctcggtcatggtgcttttcgttgcattaaaagtgccggtcaaactttgatagtatttttttatagttggtgcagagtggaataactcatggattatttcaatatttttgtaataaaaaatatagggtatacacataggcatcatcacattttttatagacctggaatcgtttaaaatactttaagcatcataattacttgggatgtcagaaactggtccacaaattccatcagcctgcctcagcagattgaaaacatttgtctcttgcaagatcaccctactttgcaagttggtgcccccaggaacctggccaggggtgctatcagaatatcaggtgaagagagaatcagcttaaatagaaagggcttgtcaagactggccaatgtttcccaggaaatcaaagatgtaaatgattactttcatccatccattataacaaacctgaccacagtggaagctgtcttaaacttccttccctggttttatattaacccaactgatagattaagtattagtcaaaccactaaaaaaaaaaaaaaaaaa

SEQ ID NO: 627 - DNA, 2737 bp, Homo sapiens
agtgcctcaccaccacctgcccgcgcgccgccccatataaaggcgccgccgtccttacccccaggactcggccccatggagacgccgccggccgccgctggcgcatggcgggtaggagctgtggcgcggggccttccaggagtctgagctatgagtggcccctgtggagagaagcctgtcctggaagccagccccaccatgagtctgtgggaatttgaggacagccacagccgtcagggcaccccaaggccgggtcaagagctggccgctgaggaggcctcggccctggaactgcagatgaaggtggacttcttccggaagctgggctattcatccacggagatccacagcgtcctgcagaagctgggcgtccaggcagacaccaacacggtgctgggtgagctggtgaaacacgggacagccaccgagcgggagcgccagacctcaccggacccctgccctcagctccctctagtcccgcggggtggtggcacccctaaggctcccaacctggagcctccactcccagaagaggaaaaggagggcagcgacctgagaccagtggtcatcgatgggagcaacgtggccatgagccatgggaacaaggaggtcttctcctgccggggcatcctgctggcagtgaactggtttctggagcggggccacacagacatcacagtgtttgtgccatcctggaggaaggagcagcctcggcccgacgtgcccatcacagaccagcacatcctgcgggaactggagaagaagaagatcctggtgttcacaccatcacgacgcgtgggtggcaagcgggtggtgtgctatgacgacagattcattgtgaagctggcctacgagtctgacgggatcgtggtttccaacgacacataccgtgacctccaaggcgagcggcaggagtggaagcgcttcatcgaggagcggctgctcatgtactccttcgtcaatgacaagtttatgccccctgatgacccactgggccggcacgggcccagcctggacaacttcctgcgtaagaagccactcactttggagcacaggaagcagccgtgtccctatggaaggaaatgcacctatgggatcaagtgccgattcttccacccagagcggccaagctgcccccagcgctctgtggcagatgagctccgtgccaatgctctcctctcaccccccagagccccaagcaaggacaaaaatggccggcggccttcaccttcatcccagtccagctctctgctaacagagagtgagcagtgcagcctggatgggaagaagctgggggcccaggcatccccagggtcccgccaagagggtctaacacagacctatgccccatcaggcaggagcctcgcacctagcgggggcagtggcagcagctttgggcccacagactggctcccacagacgctggactcactcccgtacgtctcccaggattgcctggactcgggcattggctccctggagagccagatgtcggaactttggggggttcgaggaggaggccctggtgagccgggcccaccccgagccccttacacgggctacagtccctatggatctgagctcccagccaccgcagccttctctgcctttggccgggccatgggtgctggccacttcagtgtccctgccgactacccacccgcgccccctgcctttccacctcgagagtactggtctgaaccatacccactgcccccacccacatcagtccttcaggagcccccagtgcagagcccaggggctggcaggagcccgtggggcagggcaggcagcctggccaaggagcaggccagcgtgtatactaagctgtgtggtgtgtttcccccgcacctggtggaggctgtgatggggcgcttcccacagctcctggacccccagcagctggctgccgagatcctctcctacaagtcccagcaccccagtgagtaagctgcctgtggctggcaagggcagcacccccagcctccaagggccgtcaggctgggctttgggccattgagcagcccattcccagccctgaggcccaccccagaggctggacagagggaggattcaagtcgggaaggaaacccacaaaccaaagatactgtaggattggttctggcccatgcagcacctctagctgtctgcctcagtgggtcagaagcgatcaccctgttgatacacattgtatctctgtagtttaaggagacgctgccggtaacggcgtcggtccgtggctgaggcccaaaccgtcttttctctcagagggtggggagggaggtgggggcagcagaggcctgggctgggtgccctgtgcacgccaccccacttccgccctacccctgggacgttggccttggctggctagttgggcaccgtgtgcctgccctccaagggcctcctctacgccaatgaggcctcatctgtgctctcgctgggcacgtggcttcatgtcagtaagcaagatgcttcttaataacccaccttctgccccactctattccttatcctgctgcccctgtaggggtcaagggccctccgtctacaccctcttcttctcctccatcctttattcagagtcatctcgcccttccccatgggtgggggaacctgtgtttgtttgtgtgcacatgtaaattttaaatattttaagcagaaagtccttacctcctgtaacacatcaataaagtacaatcattgtgagccctttcaaaaaaaaaaaaaaaaaaaaaaa

SEQ ID NO: 628 - DNA, 4507 bp, Homo sapiens
tcagcggcagcagccgccgccgagatgtcccggcgaaagcaaagcaaaccccggcagatcaaacggccgcttgaagatgccattgaagatgaggaagaagaatgtccatcagaggaaacagacatcatctccaaaggagactttccattggaggaaagcttttccacagaatttgggcctgaaaatctgagctgcgaagaagtggaatacttttgtaacaaaggtgatgatgaaggaatccaggagacagcagaatcagatggggacacacagtcagagaaaccggggcaacctggagttgagacagacgactgggatggaccaggagagctggaggtgtttcagaaagatggggaacgaaaaattcagagtcgacagcaacttccagtgggaacaacctgggggccgtttcctgggaagatggacttgaataataattctttgaagacaaaggctcaggtcccaatggtgctgactgctggtcccaagtggttgctggatgtgacttggcaaggagtggaagacaacaaaaacaactgcattgtgtacagcaaagggggtcagctttggtgtacaactacgaaggccatctctgagggtgaagagctaattgcctttgtggtggattttgactcaaggctacaagctgccagtcagatgactctcacagaagggatgtaccctgcacgcctgctggactcaattcagctgcttcctcagcaagctgccatggcttctattttgcccacagctattgtcaataaggatatattcccttgcaagtcctgtggcatctggtatcggagtgagcggaatctgcaggcccatttgatgtactactgcagtgggaggcaaagagaagctgctccggtgtcagaggaaaatgaagacagtgcccatcagatttccagcctgtgccccttcccacagtgcaccaagagcttttcaaatgctcgagctctagaaatgcacctgaattcacacagtggagtgaaaatggaagaattcctgccccctggtgctagtctaaaatgcaccgtctgtagctacactgctgattccgtgatcaactttcaccaacacctgttctcccatctcactcaagctgccttccgatgtaatcactgccatttcggcttccagactcagagggagttattgcagcaccaggagctccatgtccctagcggcaaacttcccagagaaagtgacatggaacactctccaagtgcaactgaagacagcttacagccagccacagacttattgaccagaagcgaacttccccagagccaaaaggccatgcagactaaagatgcgagctctgacacagagctggacaagtgtgagaaaaagactcagctctttctcacgaaccagagaccagagatacagcctacaacaaataaacaaagcttttcttacacaaaaataaagtctgagccctctagcccaagacttgcctcatctccagttcagcctaatattgggccttctttccctgtgggccctttcctatctcagttttctttcccccaagatatcaccatggtccctcaagcttcagagatcttagctaagatgtctgaactggtgcatcggcgactgaggcatggcagtagtagctaccctcccgtcatttacagccctttgatgcccaagggggctacttgttttgagtgtaacataacattcaataatttggataattatctagtgcacaaaaagcattattgcagcagccgatggcagcagatggctaagtccccagagttccctagtgtgtcagaaaagatgcctgaagctttgagtcccaacactggccaaacctccataaaccttctcaacccagctgctcattctgctgatcctgagaatccacttcttcaaacatcttgcatcaattcttccactgtcttagatttaattgggccaaatgggaagggccatgacaaggacttttccactcaaactaagaagctctccacctccagtaacaatgatgacaaaattaatggaaaacctgttgatgtgaaaaatcccagtgtccccttagtggatggggaaagtgacccaaataagactacctgtgaagcttgcaacattaccttcagccggcacgaaacatacatggtccacaaacagtattactgtgctacacgccacgaccctccactgaagaggtctgcttccaacaaagtgcctgccatgcagagaaccatgcgcacacgcaagcgcagaaagatgtatgagatgtgcctacctgagcaggaacaaaggcctccactggttcagcagagatttcttgacgtagccaacctcaataatccttgtacctccactcaagaacccacagaagggctaggagagtgctaccacccaagatgtgatatctttccaggaattgtctctaaacacttggaaacttctctgacgatcaacaagtgtgttccagtttccaaatgtgatactactcattccagtgtttcctgcctagagatggacgtgcccatagatctcagcaaaaagtgtttatctcagtctgagcggacgaccacgtctcccaaaaggctgctggactatcacgagtgcactgtgtgcaagatcagtttcaataaggtagaaaactatctggcccacaagcagaatttctgcccggttactgcacatcagcgtaatgacctgggtcaactggacggcaaagtgtttccgaatccagaaagcgaacgaaacagccctgatgtcagctacgaaagaagcataataaaatgtgagaaaaatgggaatttgaagcagccttcccccaatggaaacttattttcatcccacctagcaaccccgcaaggcttgaaggtctttagtgaagctgctcagctcattgctacaaaagaagaaaacagacatttgtttcttccacaatgcctttaccctggagcaataaagaaagcaaaaggagccgaccagctttctccatattatggaatcaagccaagtgattatatttctggttctcttgtcatccataacactgacatcgagcaaagcagaaatgcagaaaatgaatctcctaaaggccaggcttcctcaaatgggtgtgctgcgctgaagaaagattctctgccattgttgcccaaaaatcgaggaatggtaatagtgaatggtggactgaaacaagatgagagacctgctgccaacccacagcaagagaacatttcccagaatcctcagcacgaagacgaccacaaatctccctcgtggatctctgagaacccattagctgccaatgagaatgtctcaccaggaattccctcagcagaggaacagttgtctagtatagcaaaaggtgtgaatggttccagccaggctccaaccagtgggaaatattgccggctatgtgatatccagttcaacaacctttcaaactttataactcacaagaagttttattgctcatcacatgcagcagaacatgtcaaatgaactaactaaacatcagtcacctttggtatcagtgtttagtatgttgttctaaccagtccagaaaaaaaaataagctgtttgaattacatctgggcaatcaggagataattcattatggctgagttgaagacttaaggtgtaatttcattacagtccattagtaaagtgtattattggtgccattttcaaaaaaattaatttattttaccagcagtattcatagctgtggttatgttattttttatttaaaaactttatattaaagtcatttgtaatgttattgtatagttattgtgtagcacatatggtttgcactgtatagtagcttttaaagaaaatagtcacaatacagaaaagcattttagaaatagcttcaaaagcacttgtgtatcttgattttttcttatatgctgttgcagatatatgtatatgctaaaatataacttgcaaagatgttctaaatacacatgctataagttcgccttaagatttcaattcttggataatcaggctctgtttgcactttatattttagcagatacagtctcttagtcactaggctttgcatttgtatgtagctgtatgtttccgtccattttcttaatcctgaacctgtatgttaaatgaagatggcaatttttttcttgtatagtacttgtattttctttcgctgatgcagctctgtctcaatttttaaacctttgctgttaaatgcaatactttataaagaatgaacaaaattactggaagcagtattgtaagtaatgaggtagtattaatcagttttatcttttgaaaggcacagtctaaatcgaaaccctaaactcaatgctgcaagtatgaatttaattcatatataagatctatttaaatataagagtagcaatactgcacctggtgatcacaaagataatgttctacttctgatagaaataatttctcaacaaatgttgttactatgcatgtatatggatggaataaaattccagattgttggagaaaaaaaaaaaaaaaaaaaaaaaaaaaa

SEQ ID NO: 629 - DNA, 4500 bp, Homo sapiens
tcagcggcagcagccgccgccgagatgtcccggcgaaagcaaagcaaaccccggcagatcaaacggccgcttgaagatgccattgaagatgaggaagaagaatgtccatcagaggaaacagacatcatctccaaaggagactttccattggaggaaagcttttccacagaatttgggcctgaaaatctgagctgcgaagaagtggaatacttttgtaacaaaggtgatgatgaaggaatccaggagacagcagaatcagatggggacacacagtcagagaaaccggggcaacctggagttgagacagacgactgggatggaccaggagagctggaggtgtttcagaaagatggggaacgaaaaattcagagtcgacagcaacttccagtgggaacaacctgggggccgtttcctgggaagatggacttgaataataattctttgaagacaaaggctcaggtcccaatggtgctgactgctggtcccaagtggttgctggatgtgacttggcaaggagtggaagacaacaaaaacaactgcattgtgtacagcaaagggggtcagctttggtgtacaactacgaaggccatctctgagggtgaagagctaattgcctttgtggtggattttgactcaaggctacaagctgccagtcagatgactctcacagaagggatgtaccctgcacgcctgctggactcaattcagctgcttcctcagcaagctgccatggcttctattttgcccacagctattgtcaataaggatatattcccttgcaagtcctgtggcatctggtatcggagtgagcggaatctgcaggcccatttgatgtactactgcagtgggaggcaaagagaagctgctccggtgtcagaggaaaatgaagacagtgcccatcagatttccagcctgtgccccttcccacagtgcaccaagagcttttcaaatgctcgagctctagaaatgcacctgaattcacacagtggagtgaaaatggaagaattcctgccccctggtgctagtctaaaatgcaccgtctgtagctacactgctgattccgtgatcaactttcaccaacacctgttctcccatctcactcaagctgccttccgatgtaatcactgccatttcggcttccagactcagagggagttattgcagcaccaggagctccatgtccctagcggcaaacttcccagagaaagtgacatggaacactctccaagtgcaactgaagacagcttacagccagccacagacttattgaccagaagcgaacttccccagagccaaaaggccatgcagactaaagatgcgagctctgacacagagctggacaagtgtgagaaaaagactcagctctttctcacgaaccagagaccagagatacagcctacaacaaataaacaaagcttttcttacacaaaaataaagtctgagccctctagcccaagacttgcctcatctccagttcagcctaatattgggccttctttccctgtgggccctttcctatctcagttttctttcccccaagatatcaccatggtccctcaagcttcagagatcttagctaagatgtctgaactggtgcatcggcgactgaggcatggcagtagtagctaccctcccgtcatttacagccctttgatgcccaagggggctacttgttttgagtgtaacataacattcaataatttggataattatctagtgcacaaaaagcattattgcagcagccgatggcagcagatggctaagtccccagagttccctagtgtgtcagaaaagatgcctgaagctttgagtcccaacactggccaaacctccataaaccttctcaacccagctgctcattctgctgatcctgagaatccacttcttcaaacatcttgcatcaattcttccactgtcttagatttaattgggccaaatgggaagggccatgacaaggacttttccactcaaactaagaagctctccacctccagtaacaatgatgacaaaattaatggaaaacctgttgatgtgaaaaatcccagtgtccccttagtggatggggaaagtgacccaaataagactacctgtgaagcttgcaacattaccttcagccggcacgaaacatacatggtccacaaacagtattactgtgctacacgccacgaccctccactgaagaggtctgcttccaacaaagtgcctgccatgcagagaaccatgcgcacacgcaagcgcagaaagatgtatgagatgtgcctacctgagcaggaacaaaggcctccactggttcagcagagatttcttgacgtagccaacctcaataatccttgtacctccactcaagaacccacagaagggctaggagagtgctaccacccaagatgtgatatctttccaggaattgtctctaaacacttggaaacttctctgacgatcaacaagtgtgttccagtttccaaatgtgatactactcattccagtgtttcctgcctagagatggacgtgcccatagatctcagcaaaaagtgtttatctcagtctgagcggacgaccacgtctcccaaaaggctgctggactatcacgagtgcactgtgtgcaagatcagtttcaataaggtagaaaactatctggcccacaagcagaatttctgcccggttactgcacatcagcgtaatgacctgggtcaactggacggcaaagtgtttccgaatccagaaagcgaacgaaacagccctgatgtcagctacgaaagaagcataataaaatgtgagaaaaatgggaatttgaagcagccttcccccaatggaaacttattttcatcccacctagcaaccccgcaaggcttgaaggtctttagtgaagctgctcagctcattgctacaaaagaagaaaacagacatttgtttcttccacaatgcctttaccctggagcaataaagaaagcaaaaggagccgaccagctttctccatattatggaatcaagccaagtgattatatttctggttctcttgtcatccataacactgacatcgagcaaagcagaaatgcagaaaatgaatctcctaaaggccaggcttcctcaaatgggtgtgctgcgctgaagaaagattctctgccattgttgcccaaaaatcgaggaatggtaatagtgaatggtggactgaaacaagatgagagacctgctgccaacccacagcaagagaacatttcccagaatcctcagcacgaagacgaccacaaatctccctcgtggatctctgagaacccattagctgccaatgagaatgtctcaccaggaattccctcagcagaggaacagttgtctagtatagcaaaaggtgtgaatggttccagccaggctccaaccagtgggaaatattgccggctatgtgatatccagttcaacaacctttcaaactttataactcacaagaagttttattgctcatcacatgcagcagaacatgtcaaatgaactaactaaacatcagtcacctttggtatcagtgtttagtatgttgttctaaccagtccagaaaaaaaaataagctgtttgaattacatctgggcaatcaggagataattcattatggctgagttgaagacttaaggtgtaatttcattacagtccattagtaaagtgtattattggtgccattttcaaaaaaattaatttattttaccagcagtattcatagctgtggttatgttattttttatttaaaaactttatattaaagtcatttgtaatgttattgtatagttattgtgtagcacatatggtttgcactgtatagtagcttttaaagaaaatagtcacaatacagaaaagcattttagaaatagcttcaaaagcacttgtgtatcttgattttttcttatatgctgttgcagatatatgtatatgctaaaatataacttgcaaagatgttctaaatacacatgctataagttcgccttaagatttcaattcttggataatcaggctctgtttgcactttatattttagcagatacagtctcttagtcactaggctttgcatttgtatgtagctgtatgtttccgtccattttcttaatcctgaacctgtatgttaaatgaagatggcaatttttttcttgtatagtacttgtattttctttcgctgatgcagctctgtctcaatttttaaacctttgctgttaaatgcaatactttataaagaatgaacaaaattactggaagcagtattgtaagtaatgaggtagtattaatcagttttatcttttgaaaggcacagtctaaatcgaaaccctaaactcaatgctgcaagtatgaatttaattcatatataagatctatttaaatataagagtagcaatactgcacctggtgatcacaaagataatgttctacttctgatagaaataatttctcaacaaatgttgttactatgcatgtatatggatggaataaaattccagattgttggagaaaaaaaaaaaaaaaaaaaaa

SEQ ID NO: 630 - DNA, 519 bp, Homo sapiens
atgaagatcttgaagggtatgtacaaaagcttgtttgatcttcttcgtttcagttttgggttagggtgggatcctacaacgaagaaattcacggctagagatgatgtatgggatgactatttgaaggatttaagaatgatatttggattgaatgtggcaactggacaaaatgttgtgggattaggcgattccattgttgtcgatgcttctcaagttggagatgatgatgggccacatgatttaagtcatgtccaaatattagatgatatggggggatcccatgacgttttctcatcattagagaaaagaagggctgaatcgatgcaagaagctgaagaaaaggaagtcgaagacaaagctaataatgtgtgggatgctatcaaagaaatttcagatttggatgcagatttatgttacgagaccatgacattggttgacagtttaggtatgaaatctgtatttgtgcacatgtcaacagaacaacataagggatggattatgcgaagccttcgtaaataa

SEQ ID NO: 631 - DNA, 1557 bp, Homo sapiens
gtcgatacggtagcttcgcgcttgctcacgaacttgcctgcctggctggcgcacccagcccctccttccattccttcttccccctctctgcagcctctgccagcccgcactgcgcatgctttctgacgccccctttggtccagcgtgggaggaggggatggaaatgaggttgggctctatcctccacggccccatccaagccagggatgaaatttaacggcaagaagggcgcagttgacgcggcgtcaatgaaatgagactaagtcaaaagccgggccctccaaccctatccccatcagcctggtcatcaccggcgtcacccccgccccgcgccctgcccctaggttcctgtgccagcaagatgctggagcgaggcgcggagtccgcggccggggctaccgatcctagtcccactggcaaggaaccagtgaccaaagaagctccccaccagggcccaccgcagaagcccagccagtcagctccagggcccaccgcgtccgcgggctcgcctccccggcctcgccggcggcccccgccccagcgcccgcaccgctgccccgactgtgacaaggccttctcgtacccgtccaagctggccacgcaccgcttagcacacggaggcgcccgaccccacccatgcccagactgccccaaggccttctcctacccctccaagctggcagcccaccgcctcacgcacagcggcgcccgcccgcacccgtgcccacactgcccgaagtcctttggccaccgctccaagctggcggctcacctctggacccacgcacccacccgcccctacccgtgccccgactgccccaagtccttctgctacccttccaagctggcggcccaccgccacacgcaccacgccaccgacgcccgcccctatccttgcccgcattgccccaaggctttctcatttccctccaagctggccgcccatcgcctatgtcacgaccccccaaccgcgcccggcagccaggcgactgcctggcaccgatgctccagctgcggccaggcctttggccagagacgcttactgctccttcatcaacgcagccaccaccaggtggagcacaagggggagagagactgagccctcccttggctcactgtccccttctgccgccagccctagccagtaagaggtgggatttctaagaccgactgtatgagctcgcctcttccagatagctggcagagggcagggcaagggattggccatttatactgggctcgagctcagaagcccgaggaactctttgctcccctgctttggggagatctcaaaccatggacgtggagctgtggtttgacagcgctggctctgcttctccccacacacttacatggcaaaggtaaaaagtctgctactatcgtgggttgatgaggattgtgggcaaacaggctctcttgttaaaagtttaaactggtgtctccactttggccatatgacggtatctaagaaattgaaaatacatacatgcttgtctcaactcttccacttgtaggaatttattctataaactcatgaatgtgaaaaaaaaaaaaaaa

SEQ ID NO: 632 - DNA, 1654 bp, Homo sapiens
cgagaggctctgaggctgccagagtggttgtgtctgttcctccggtaaggggtgattcgccgaggggcgcggaccagacagacctcgggtcaggcccgggaaccccgagaggagagcccagcccctggtggaggcggcttggcggagattcggagccgtcagcagctcagccagacgtccaggatcccaccccttgcaaaagaccaggccgtggaagccatgttcccaccagccagggggaaggagctgctctcgtttgaggatgtggcgatgtacttcaccagagaggagtggggccacctcaactggggtcagaaggacctctaccgagatgtgatgttggagaactacaggaacatggtcttgctgggatttcagtttcccaaacctgagatgatctgtcagctggagaactgggacgagcagtggatcctggatctaccgagaactgggaataggaaggcttccggtagtgcttgcccaggttctgaagccagacacaagatgaaaaagctaactccaaaacagaaattttctgaagatttagagtcatataagatatcagtggtaatgcaggaatcagctgagaaactttcagaaaagttacataagtgtaaagaatttgtggacagttgcaggcttactttccctactagtggtgatgaatacagcaggggcttccttcaaaaccttaaccttattcaagatcagaatgcgcaaacaaggtggaagcagggcagatatgatgaggatggcaaacccttcaatcaaagatctttgcttttggggcatgagcgaattctcacaagagcaaagtcttatgaatgcagtgaatgtggaaaagtcattaggcgtaaggcatggtttgatcaacatcaaagaattcactttttagagaatccttttgagtgtaaggtctgtgggcaagccttcagacagcggtcagctcttacggtccataaacagtgtcacctgcaaaacaagccatacagatgtcatgactgtggaaagtgttttcggcagctcgcgtatcttgttgaacataagaggattcacaccaaagaaaaaccttataaatgtagcaaatgtgaaaaaacgtttagtcagaattcaacccttattcgacatcaggtgatccatagtggagaaaaacgccataaatgccttgagtgtggaaaagcctttggccggcattcaacccttctatgtcatcaacagattcacagtaaaccgaacacccataaatgcagtgaatgtggacagtcctttggtaggaatgtggatctcattcagcatcaaagaatccatacaaaggaggaattctttcaatgtggagaatgtgggaaaacgtttagttttaagaggaatctttttcgacatcaggtcattcacactggaagccaaccctaccaatgtgtcatatgtggaaaatctttcaagtggcacacaagctttattaagcaccagggcactcacaaaggacagatatccacatgatgttaattggaaagcagtcattggagaactagaacttataaacctctacttcaagtgtgtatcacgtaattgtttccatgaaaagcaataaatgtaacaaagggttaaaaaaaaaaaaaaaaaaaaaaaaaaaaaaaaaaaaaaaaaaaaaaaaaaa

SEQ ID NO: 633 - DNA, 399 bp, Homo sapiens
cagtctcagtcaggacacagcatggacatgagggtccccgctcagctcctggggctcctgctactctggctccgaggtgccagatgtgacatccagatgacccagtctccatcctccctgtctgcatctgtaggagacagagtcaccatcacttgccgggcaagtcagagcattagcagctatttaaattggtatcagcagaaaccagggaaagcccctaagctcctgatctatgctgcatccagtttgcaaagtggggtcccatcaaggttcagtggcagtggatctgggacagatttcactctcaccatcagcagtctgcaacctgaagattttgcaacttactactgtcaacagagttacagtacccctcccacagtgttacaagtcataacataa

SEQ ID NO: 634 - DNA, 565 bp, Homo sapiens
atgcagctggtggaggtgacactaaacctgggtctgtccttcccagaggcacagtctgattctgcccggagtaagacattgacgggagctgggggcttcgtgctggggctcatcatctgtggagtgggcaccttcatgcacaggaggagcaagaaagttcaacgaggatctgcataaacagggttcctgacctcaccgaaaagactaatgtgccttagaacaagcatttgctgtgttttgttagcacctggttccaggacagaccctcagcttcccaagaggatactgctgccaagaagttgctctgaagtcagtttctatcgttctgctctttgattcaaagcactgtttctctcactgggcctccaaccatgttcccttcttcttagcaccacaaataatcaaaacccaacataagtgtttgctttcctttaaaaatatgcatcaaatcgtctctcattacttttctctgagggttttagtaaacagtaggagttaataaagaagttcattttggtttacacgtaggaaagaagagaagcatgaaagtggagatatgttaact

SEQ ID NO: 635 - DNA, 1109 bp, Homo sapiens
agaggaaccagaaatttgtccttgaataatgtttcccgacaacgaagaggcagaaggatctgggcctgtgcgcgacgccccgggggacgaggctcatggagaagtttcgggcggtgctggacctgcacgtcaagcaccacagcgccttgggctacggcctggtgaccctgctgacggcgggcggggagcgcatcttctccgccgtggcattccagtgcccgtgcagcgccgcctggaacctgccctacggcctggtcttcttgctggtgccggcgctcgcgctcttcctcctgggctacgtgctgagcgcacgcacgtggcgcctgctcaccggatgctgctccagcgcccgcgcgagttgcggatcggcgctgcgcggctccctggtgtgcacgcaaatcagcgcggccgccgcgctcgcgcccctcacctgggtggccgtggcgctgctcgggggcgccttttacgagtgcgcggccaccgggagcgcggccttcgcgcagcgcctgtgcctcggccgcaaccgcagctgcgccgcggagctgccgctggtgccgtgcaaccaggccaaggcgtcggacgtgcaggacctcctgaaggatctgaaggctcagtcgcaggtgttgggctggatcttgatagcagttgttatcatcattcttctgatttttacatctgtcacccgatgcctatctccagttagttttctgcagctgaaattctggaaaatctatttggaacaggagcagcagatccttaaaagtaaagccacagagcatgcaactgaattggcaaaagagaatattaaatgtttctttgagggctcgcatccaaaagaatataacactccaagcatgaaagagtggcagcaaatttcatcactgtatactttcaatccgaagggccagtactacagcatgttgcacaaatatgtcaacagaaaagagaagactcacagtatcaggtctactgaaggagatacggtgattcctgttcttggctttgtagattcatctggtataaacagcactcctgagttatgaccttttgaatgagtagaaaaaaaaattgttttgaattattgctttattaaaaaataaacattggta

SEQ ID NO: 636 - DNA, 576 bp, Homo sapiens
atggaaatgagggtccccgctcagctcctggggctcctgctgctctggctccgaggtgccagatgtgacatccaggtgacccagtctccatcttccctgtctgcgtctgtaggagacagagtcaccatcacctgccgggcaagtcagggcattagcaatgggttatcctggtatcagcagaaaccagggcaagcccctacgctcctgatctatgctgcatccagtttgcagtcgggggtcccatctcggttcagtggcagtggatctgggacagatttcactctcaccatcagcagcctgcagcctgaagatgttgcaacttattactgtctacaggattatactaccccattcacagtgttacaagccataacaaaaaccccccagagaagcagatgtgtgagtctgcactgtcctagctactcctcctggtgcctccatctgctgagaacatttcccaaattgcatccacactttgaagtttctgtagaaagtgacatgaagcctcctctataccttaactatctttccttcacggcatccccagcggcacagacagggcaaaccctctcctga

SEQ ID NO: 637 - DNA, 1398 bp, Homo sapiens
aggctgctgagacttccctctagaatcctccaacatggagcctcttgcagcttacccgctaaaatgttccgggcccagagcaaaggtatttgcagttttgctgtctatagttctatgcacagtaacgctatttcttctacaactaaaattcctcaaacctaaaatcaacagcttttatgcctttgaagtgaaggatgcaaaaggaagaactgtttctctggaaaagtataaaggcaaagtttcactagttgtaaacgtggccagtgactgccaactcacagacagaaattacttagggctgaaggaactgcacaaagagtttggaccatcccacttcagcgtgttggcttttccctgcaatcagtttggagaatcggagccccgcccaagcaaggaagtagaatcttttgcaagaaaaaactacggagtaactttccccatcttccacaagattaagattctaggatctgaaggagaacctgcatttagatttcttgttgattcttcaaagaaggaaccaaggtggaatttttggaagtatcttgtcaaccctgagggtcaagttgtgaagttctggaggccagaggagcccattgaagtcatcaggcctgacatagcagctctggttagacaagtgatcataaaaaagaaagaggatctatgagaatgccattgcgtttctaatagaacagagaaatgtctccatgagggtttggtctcattttaaacattttttttttggagacagtgtctcactctgtcacccaggctggagtgcagtagtgcgttctcagctcattgcaacctctgcctttttaaacatgctattaaatgtggcaatgaaggatttttttttaatgttatcttgctattaagtggtaatgaatgttcccaggatgaggatgttacccaaagcaaaaatcaagagtagccaaagaatcaacatgaaatatattaactacttcctctgaccatactaaagaattcagaatacacagtgaccaatgtgcctcaatatcttattgttcaacttgacattttctaggactgtacttgatgaaaatgccaacacactagaccactctttggattcaagagcactgtgtatgactgaaatttctggaataactgtaaatggttatgttaatggaataaaacacaaatgttgaaaaatgtaaaatatatatacatagattcaaatccttatatatgtatgcttgttttgtgtacaggattttgttttttctttttaagtacaggttcctagtgttttactataactgtcactatgtatgtaactgacatatataaatagtcatttataaatgaccgtattataacatttgaaaaagtcttcatcattttcagtaaaaaaaaaaaaaaaaaaaaaaaaaaaaa

SEQ ID NO: 638 - DNA, 1742 bp, Homo sapiens
tgcttgttgttgcgcttcggaggcggcgatccccgaaggcgagctgaaatacggctggagcgttcccaggctacagtttgtagccgacgattgtggaagactaggagccggagaggtggcccaccctcagggagcgcttgtgctcggagggcttctcatttccccaataccacattaaatcgtctcatctgaggaggatccacagagctgtcttctatggtaatctggagaaactggagtaccttctgctcacgtatcatgacaccaatgagagagacaaggaggaaagcatccggtgaaagacagagatcacatttcaactagattcttaggaagtatggattcactaacttcagcgaagcttaccctgaaagaagcagatcccagttcaaaagtagccataagaaggaaggattcaccacctccaggaaaagtgtcttctcagaaacaaccagctgagaaggctgcaagtgacgagaaagattctgtttcgaatatagccacagaaataaaggagggaccaatatctgggacagtgtcttctcagaaacaaccagctgagaaggctgcaagtgacgagaaagattctgtttcaaatatagccacagaaataaaggatggacaacaatctgggagacataattttgcaaagcagatttaatgtcatgttcagccaagatagacaagaacttctcttccccgaataaatcagcgggggactctttgaagctgcacattctgattcagcaggcctgagattctacatttgtatgtcttctcagaaacaatcggcctggaaggttatatttaaaaagaaagtttctcttttgaatattgccacaagaataatgggtggtcagaaatctggaacagagtatcctgagaatctgcccaccatgaaggctacagttgaaaataaagattctgttctgaatacagccaccaaaatgaaggatgtacaaacatccacaccagaagaacaagacttagaaatggcatcagagggagagcaaaagaggcttgaagaatatgaaaataaccagccacagcaactggatgatgctcgcaacaaagctgacaatcaagaaaaggcaatacttaatattcaagccagatgtgatgctagagtacaaaaccttcaagctgagtgcagaaagcgccgtcttttactagaagacagtaaaaggttggtaaatgaattgaatcatttgaaagaaaaagaacgccaatatgaaaaaaagcaagcagaaagagaacttcaagaaacacaggatcaacttacagctactataagatgtactaaggggatggaaggcgacgcacaaaagcttgaagtagaaaatgccatgatgagaaaaactattaaaaaacaggatgaccaaattgagcgacttgagaaaatcctgcagcgttcaagtttgatgccacaggtgttcaagagctagatgaagtgcttgtcctagtaccttagcacatggttgctgaatacatgaatgaagagtgagaaaccagaagctctgatatttaactgccgtgataatgaattcaatgtgcaactatgggcaaattgtatttaatagtaattgcatattgtacatatttttcattcttattaacactgataaacttttcaacttatactgactttaataaaattgtattactaggctattaacatgatattttgtttcccattaaatgtgacatgcaaagacgtttattaaatgaaaatatttttgtat

SEQ ID NO: 639 - DNA, 1742 bp, Homo sapiens
tgcttgttgttgcgcttcggaggcggcgatccccgaaggcgagctgaaatacggctggagcgttcccaggctacagtttgtagccgacgattgtggaagactaggagccggagaggtggcccaccctcagggagcgcttgtgctcggagggcttctcatttccccaataccacattaaatcgtctcatctgaggaggatccacagagctgtcttctatggtaatctggagaaactggagtaccttctgctcacgtatcatgacaccaatgagagagacaaggaggaaagcatccggtgaaagacagagatcacatttcaactagattcttaggaagtatggattcactaacttcagcgaagcttaccctgaaagaagcagatcccagttcaaaagtagccataagaaggaaggattcaccacctccaggaaaagtgtcttctcagaaacaaccagctgagaaggctgcaagtgacgagaaagattctgtttcgaatatagccacagaaataaaggagggaccaatatctgggacagtgtcttctcagaaacaaccagctgagaaggctgcaagtgacgagaaagattctgtttcaaatatagccacagaaataaaggatggacaacaatctgggagacataattttgcaaagcacatttaatgtcatgttcagccaagatagacaagaacttctcttccccgaataaatcagcgggggactctttgaagctgcacattctgattcagcaggcctgagattctacatttgtatgtcttctcagaaacaatcggcctggaaggttatatttaaaaagaaagtttctcttttgaatattgccacaagaataatgggtggtcagaaatctggaacagagtatcctgagaatctgcccaccatgaaggctacagttgaaaataaagattctgttctgaatacagccaccaaaatgaaggatgtacaaacatccacaccagaagaacaagacttagaaatggcatcagagggagagcaaaagaggcttgaagaatatgaaaataaccagccacagcaactggatgatgctcgcaacaaagctgacaatcaagaaaaggcaatacttaatattcaagccagatgtgatgctagagtacaaaaccttcaagctgagtgcagaaagcgccgtcttttactagaagacagtaaaaggttggtaaatgaattgaatcatttgaaagaaaaagaacgccaatatgaaaaaaagcaagcagaaagagaacttcaagaaacacaggatcaacttacagctactataagatgtactaaggggatggaaggcgacgcacaaaagcttgaagtagaaaatgccatgatgagaaaaactattaaaaaacaggatgaccaaattgagcgacttgagaaaatcctgcagcgttcaagtttgatgccacaggtgttcaagagctagatgaagtgcttgtcctagtaccttagcacatggttgctgaatacatgaatgaagagtgagaaaccagaagctctgatatttaactgccgtgataatgaattcaatgtgcaactatgggcaaattgtatttaatagtaattgcatattgtacatatttttcattcttattaacactgataaacttttcaacttatactgactttaataaaattgtattactaggctattaacatgatattttgtttcccattaaatgtgacatgcaaagacgtttattaaatgaaaatatttttgtat

SEQ ID NO: 640 - DNA, 914 bp, Homo sapiens
tgtggcagatttcagaggcccttaaaatgaggccaagtgaggtggacaggtccgagccagctgaggactcctcagccacacggcacagctgcctgaggggatgtgtcactcagggagttgctgggacctactgggcccagcgttgccatcagcaccaacagcttcagagagggggacacatgccggggtgactccaaggctgtgggcggcacctgcctcagatagagaacaggcacagagacactactgggggacactactgggacactggccacccccctaccctgtgcctagatcacagcctacacactgcagccctgtgcccctcacacccagcaggttcctgctccagcgcggctcctggactggccccgggtgctggccccgggggtttcaatccaagcataattcagtgaagcatgtgtttggcagcgggacccagctcaccgttttaggtcagcccaaggccaccccctcggtcactctgttcctgccgtcctctgaggagctccaagccaacaaggccacactggtgtgtctcatgaatgacttctatctgggaatcttgacggtgacctggaaggcagatggtacccccatcacccagggcgtggagatgaccacgccctccaaacagagcaacagcaagtacatggccagcagctacctgagcctgacgcccgagcagtggaggtcccgcagaagctacagctgccaggtcatgcatgaagggagcactgcagagaagacggtggcccctgcagaatgttcataggttcccagcccccaccccacccacaggggcctggagctgcaggatcccaggggaggcgtctctctctgcatcccaagccatccagcccttctccctgtacccagtaaaccctcagtaaatatcctctttgtcaaccaga

SEQ ID NO: 641 - DNA, 1589 bp, Homo sapiens
cctgtgcaagaacatgaaacacctgtggttcttcctcctgctggtggcagctcccagatgggtcctgtcccaggtgcagctgcaggagtcgggcccaggactggtgaagccttcacagaccctgtccctcacctgcactgtctctggtggctccatcagcagtggtgattactactggagctggatccgccagcccccagggaagggcctggagtggattgggtacatctattacagtgggagcacctactacaacccgtccctcaagagtcgagttaccatatcactagacacgtccaagaaccagttctccctgaagatgaactctgtgactgccgcagacacggccgtgtatttctgtgccagagcgggcgtttgggggagttttcgttcctgggcgattgatggttttaatatctggggccaagggacaatggtcaccgtctcttcagcctccaccaagggcccatcggtcttccccctggcaccctcctccaagagcacctctgggggcacagcagccctgggctgcctggtcaaggactacttccccgaaccggtgacggtgtcgtggaactcaggcgccctgaccagcggcgtgcacaccttcccggctgtcctacagtcctcaggactctactccctcagcagcgtggtgaccgtgccctccagcagcttgggcacccagacctacatctgcaacgtgaatcacaagcccagcaacaccaaggtggacaagaaagttgagcccaaatcttgtgacaaaactcacacatgcccaccgtgcccagcacctgaactcctggggggaccgtcagtcttcctcttccccccaaaacccaaggacaccctcatgatctcccggacccctgaggtcacatgcgtggtggtggacgtgagccacgaagaccctgaggtcaagttcaactggtacgtggacggcgtggaggtgcataatgccaagacaaagccgcgggaggagcagtacaacagcacgtaccgtgtggtcagcgtcctcaccgtcctgcaccaggactggctgaatggcaaggagtacaagtgcaaggtctccaacaaagccctcccagcccccatcgagaaaaccatctccaaagccaaagggcagccccgagaaccacaggtgtacaccctgcccccatcccgggatgagctgaccaagaaccaggtcagcctgacctgcctggtcaaaggcttctatcccagcgacatcgccgtggagtgggagagcaatgggcagccggagaacaactacaagaccacgcctcccgtgctggactccgacggctccttcttcctctacagcaagctcaccgtggacaagagcaggtggcagcaggggaacgtcttctcatgctccgtgatgcatgaggctctgcacaaccactacacacagaagagcctctccctgtctccgggtaaatgagtgccacggccggcaagcccccgctccccaggctctcggggtcgcgcgaggatgcttggcacgtaccccgtgtacatacttcccaggcacccagcatggaaataaagcacccagcgcttccctgggaaaaaaaaaaaaaaaaaaa

SEQ ID NO: 642 - DNA, 816 bp, Homo sapiens
atgaggtcaataaaagcaggggacaatccattccaatgtacctgtgagctaggagaatttgtcaaaaatatagaccaagtatcaagtgaagtgttagagggctggcctgattcttataagtgtgactacccggaaagttatagaggaaccctactaaaggactttcacatgtctgaattatcctgcaacataactctgctgatcgtcaccatcgttgccaccatgctggtgttggctgtgactgtgacctccctctgcagctacttggatctgccctggtatctcaggatggtgtgccagtggacccagacccggcgcagggccaggaacatacccttagaagaactccaaagaaatctccagtttcatgcatttatttcatatagtgggcacgattctttctgggtgaagaatgaattattgccaaacctagagaaagaaggtatgcagatttgccttcatgagagaaactttgttcctggcaagagcattgtggaaaatatcatcacctgcattgagaagagttacaagtccatctttgttttgtctcccaactttgtccagagtgaatggtgccattatgaactctactttgcccatcacaatctctttcatgaaggatctaatagcttaatcctgatcttgctggaacccattccgcagtactccattcctagcagttatcacaagctcaaaagtctcatggccaggaggacttatttggaatggcccaaggaaaagagcaaacgtggccttttttgggctaacttaagggcagccattaatattaagctgacagagcaagcaaagaaatag

SEQ ID NO: 643 - DNA, 5393 bp, Homo sapiens
agagtctgtgcgaaggtaggtggacagactgcattgcttgttgttgcgcttcggaggcggcgatccccgaaggcgagctgaaatacggctggagcgttcccaggctacagtttgtagccgacgattgtggaagactaggagccggagaggtggcccaccctcagggagcgcttgtgctcggagggcttctcatttccccaataccacattaaatcgtctcatctgaggaggatccacagagctgtcttctatggtaatctggagaaactggagtaccttctgctcacgtatcatgacaccaatgagagagacaaggaggaaagcatccggtgaaagacagagatcacatttcaactagattcttaggaagtatggattcactaacttcagcgaagcttaccctgaaagaagcagatcccagttcaaaagtagccataagaaggaaggattcaccacctccaggaaaagtgtcttctcagaaacaaccagctgagaaggctgcaagtgacgagaaagattctgtttcgaatatagccacagaaataaaggagggaccaatatctgggacagtgtcttctcagaaacaaccagctgagaaggctgcaagtgacgagaaagattctgtttcaaatatagccacagaaataaaggatggacaacaatctgggagacataattttgcaaagcacatttaatgtcatgttcagccaagatagacaagaacttctcttccccgaataaatcagcgggggactctttgaagctgcacattctgattcagcaggcctgagattctacatttgtatgtcttctcagaaacaatcggcctggaaggttatatttaaaaagaaagtttctcttttgaatattgccacaagaataatgggtggtcagaaatctggaacagagtatcctgagaatctgcccaccatgaaggctacagttgaaaataaagattctgttctgaatacagccaccaaaatgaaggatgtacaaacatccacaccagaagaacaagacttagaaatggcatcagagggagagcaaaagaggcttgaagaatatgaaaataaccagccacagcaactggatgatgctcgcaacaaagctgacaatcaagaaaaggcaatacttaatattcaagccagatgtgatgctagagtacaaaaccttcaagctgagtgcagaaagcgccgtcttttactagaagacagtaaaaggttggtaaatgaattgaatcatttgaaagaaaaagaacgccaatatgaaaaaaagcaagcagaaagagaagtaagtatcaagaaaaataagtatttttcaaacttcctgaagtaaaatttaaagtaatatttggttacagctgaatgttggatctagttgaatataaaaaagatacatatgataaatatatctgctatatcagcttagaaacattccttttttccagcaagtcaaagttagaactgagagatgctttcctctgattaaagtcaatgtgtcacttataaaattttaagttataaaatgttaatatagactaatattaataatgtagtcttatactgctgaaataataattttaatgtatttatgttgcaacattttaagaccatgataaatcagatatatggaaatgctcatacctaaaatggtattttgaaattgattcaattaaatggggtactttgacagttaatttcagatttcctagatgaactgaagtgtattccctatttcataattacttttcttcagtagcttgaaatatgtctttgttggtaaaattttgtttttcttcatgtcaatttgacttaaatctgaaactatttcaatctcaaattatgtagagatatgatcattctattctttaaaggcgtctaattttacttatattataatatggggaaaatgcagtaaattttagccaaatcatgtttgattttatcttcccactggcatttataatttactttcagtttttaaacaaagaatttgctcataatttttatttcaaggctcaattactatcatttggatataactttgtccaggacaaagagaggcatagctatctgtgatttattagtttgacactggatccccgttttcagactaaggaggatttcagactaatgaggagtggcaggattcacgcagagtaggaatggagtgagtcagggaggagagatacagcagctgagtcagggcaggaggtggagggcaggttacttagagcatctaaggccactggagttttacttttcttctgagatagacatctattggaaggatttaagcagatgatttaatgtgaggaactctgaggttgatttgagtttgtaataaaaaaaagagggaaatcattccacaatgtagaatttaccaccatcagtctcacccacatactcatttctttttgagacttcagaaggtttttaagcattgcagattcatcaggggaggaatgactagtgggctgaatatgctatgtgaataacaataccagtttggcaggaagataacaccttctgtatccttaactggattcagtaatgaacagggacgtgtacacatgaggaaaagaaggtgaatcggtctgtgtggtggtatttttcaaagtgtatgctttagagttaaatattattaatggtttaataataaggtgatttgtaaaatcagtaacaaaaataacatcaggtagctgtgagacagctttaacaaaaatgagatgatgtcttaaacaaacaatcagcaacaaaagctttgctggatgcttcatcgcttcactgcatctatttagaaaatgagatgcaggattcaaggaagaaattagaccagatgagaagtcaagtatgtatgcaactttgcacgccaacaactgttaatctgtagctggttaactaatataaagtgttttggggtactaattttagtggatggctttcttttgtatttttattataattaattttattaaaattttatagtggatggctttcttttgtattttccttattattaattttattacaattttattataatgccacctataccttaatctctggctttcattctgccgttttttatacatatgtttttttcttaaatatttaaccttaggaaagttgagaattatgcatcatttctcacataagttgagagagttttttttcctgttaaacagtctatttttaatgatttctctattggcatggtgaggcaagccagattaattcagaggataatgtctaatggaatgtttcagaaaattatcttatttttagtctctacttttctgaatgtataaagaacgtgtgtatacttatttcatagatttcaggttaacttgttcagaaaggccattttactgaataaatttttatttcgatgaaaatccttactctctttgtattgggctcagagagcacactctgtctctatatgaatatggacagttagcatttgccaacatgtatctattttctcttatttatagaaaaagctaaactaaaatgggggttatagaaggtcagcaaaggatgggtttgagatgtttgggttggttgagtgggcatttagacaacaagccttctcctttggcgtgtttaatggacatctttgcagtttaagatgatgcttttaaattacttctctcctaatgatgacttgagtcctgctattcaatgggagagtcaataagatcctgtaggatcttatttggaactgactttgtcgattttaattttgttcctgcttgtttttaaattttcttgttgtttccctagaaaggaaagatgacgcttggttttaaatatttaaaaatgtgcaagttgctttgctataataaaactaaatgcatacatacaaaaaataacattatagttgatgtggtagtgtttggaattcaaaatataaatgcttagcatgaggtaatcctttatctttccacattttaccagtttgtaagtttgagtatgtaactgataaaatgtaattcaaaagcaagaagaatgttgtgtttcagtcctagagcaggggtcagtgaactttctgtaaagggccagatagtattatttaaggctttgtgaaccataagatccttgttgcaataactcagccctgtagttatagcacaaaagtagccattaacgatatgcagattgaaggggtgtagcagtgtcccactaaaattaattacaaaaaacaggtaatgggatgatttctcctacattatgaccttttttaaataaaaaagattgtgatagtctaaaatattttatatatattttgttgattcattcatctactgatggacatttaggtcatttctaaatgtaattttttttaattctttgttttagcttcaagaaacacaggatcaacttacagctactataagatgtactaaggggatggaaggcgacgcacaaaagtaaaatttgaagcagcgcacaaaataacttgagtatttataaagcaaaagagcactgtagtatgaaaattgtatcagttatgataataagtatgtctttgtgaagccaaaaaagtttcatttgtaagctgtattgaaatacatcatttttctacattattcctaaattttgcatattatcgacaaaacacagttagaaaaatgacacagtagcccaatcatctacttttgtgatcgctaagaatttgtgtaattataccttcagaagtttgtttagaatttacatgataaaaaaaattatgtgtgagagtaattattttaaaatgcacattttaggcttgaagtagaaaatgccatgatgagaaaaactattaaaaaacaggatgaccaaattgagcgacttgagaaaatcctgcagcgttcaagtttgatgccacaggtgttcaagagctagatgaagatatcaacctatgaattgcctctaccaaaaagcctacaatattgacacaaacctgggctagtatcccttctatgtcttctaataagtgctgtcttatgcctgtcactgtatgtatgactctgtatgggaattgcctgtttgttttttcagattatagcaaacagttgttgaggggtggaccatatcatctttatcttgtaattccagtgcttgtcctagtaccttagcacatggttgctgaatacatgaatgaagagtgagaaaccagaagctctgatatttaactgccgtgataatgaattcaatgtgcaactatgggcaaattgtatttaatagtaattgcatattgtacatatttttcattcttattaacactgataaacttttcaacttatactgactttaataaaattgtattactaggctattaacatgatattttgtttcccattaaatgtgacatgcaaagacgtttattaaatgaaaatatttttgtat

SEQ ID NO: 644 - DNA, 5884 bp, Homo sapiens
agacaagaacttctcttccccgaataaatcagcgggggactctttgaagctgcacattctgattcagcaggcctgagattctacatttgtatgtcttctcagaaacaatcggcctggaaggttatatttaaaaagaaagtttctcttttgaatattgccacaagaataatgggtggtcagaaatctggaacagagtatcctgagaatctgcccaccatgaaggctacagttgaaaataaagattctgttctgaatacagccaccaaaatgaaggatgtacaaacatccacaccagaagaacaagacttagaaatggcatcagagggagagcaaaagaggcttgaagaatatgaaaataaccagccacagcaactggatgatgctcgcaacaaagctgacaatcaagaaaaggcaatacttaatattcaagccagatgtgatgctagagtacaaaaccttcaagctgagtgcagaaagcgccgtcttttactagaagacagtaaaaggttggtaaatgaattgaatcatttgaaagaaaaagaacgccaatatgaaaaaaagcaagcagaaagagaagtaagtatcaagaaaaataagtatttttcaaacttcctgaagtaaaatttaaagtaatatttggttacagctgaatgttggatctagttgaatataaaaaagatacatatgataaatatatctgctatatcagcttagaaacattccttttttccagcaagtcaaagttagaactgagagatgctttcctctgattaaagtcaatgtgtcacttataaaattttaagttataaaatgttaatatagactaatattaataatgtagtcttatactgctgaaataataattttaatgtatttatgttgcaacattttaagaccatgataaatcagatatatggaaatgctcatacctaaaatggtattttgaaattgattcaattaaatggggtactttgacagttaatttcagatttcctagatgaactgaagtgtattccctatttcataattacttttcttcagtagcttgaaatatgtctttgttggtaaaattttgtttttcttcatgtcaatttgacttaaatctgaaactatttcaatctcaaattatgtagagatatgatcattctattctttaaaggcgtctaattttacttatattataatatggggaaaatgcagtaaattttagccaaatcatgtttgattttatcttcccactggcatttataatttactttcagtttttaaacaaagaatttgctcataatttttatttcaaggctcaattactatcatttggatataactttgtccaggacaaagagaggcatagctatctgtgatttattagtttgacactggatccccgttttcagactaaggaggatttcagactaatgaggagtggcaggattcacgcagagtaggaatggagtgagtcagggaggagagatacagcagctgagtcagggcaggaggtggagggcaggttacttagagcatctaaggccactggagttttacttttcttctgagatagacatctattggaaggatttaagcagatgatttaatgtgaggaactctgaggttgatttgagtttgtaataaaaaaaagagggaaatcattccacaatgtagaatttaccaccatcagtctcacccacatactcatttctttttgagacttcagaaggtttttaagcattgcagattcatcaggggaggaatgactagtgggctgaatatgctatgtgaataacaataccagtttggcaggaagataacaccttctgtatccttaactggattcagtaatgaacagggacgtgtacacatgaggaaaagaaggtgaatcggtctgtgtggtggtatttttcaaagtgtatgctttagagttaaatattattaatggtttaataataaggtgatttgtaaaatcagtaacaaaaataacatcaggtagctgtgagacagctttaacaaaaatgagatgatgtcttaaacaaacaatcagcaacaaaagctttgctggatgcttcatcgcttcactgcatctatttagaaaatgagatgcaggattcaaggaagaaattagaccagatgagaagtcaagtatgtatgcaactttgcacgccaacaactgttaatctgtagctggttaactaatataaagtgttttggggtactaattttagtggatggctttcttttgtatttttattataattaattttattaaaattttatagtggatggctttcttttgtattttccttattattaattttattacaattttattataatgccacctataccttaatctctggctttcattctgccgttttttatacatatgtttttttcttaaatatttaaccttaggaaagttgagaattatgcatcatttctcacataagttgagagagttttttttcctgttaaacagtctatttttaatgatttctctattggcatggtgaggcaagccagattaattcagaggataatgtctaatggaatgtttcagaaaattatcttatttttagtctctacttttctgaatgtataaagaacgtgtgtatacttatttcatagatttcaggttaacttgttcagaaaggccattttactgaataaatttttatttcgatgaaaatccttactctctttgtattgggctcagagagcacactctgtctctatatgaatatggacagttagcatttgccaacatgtatctattttctcttatttatagaaaaagctaaactaaaatgggggttatagaaggtcagcaaaggatgggtttgagatgtttgggttggttgagtgggcatttagacaacaagccttctcctttggcgtgtttaatggacatctttgcagtttaagatgatgcttttaaattacttctctcctaatgatgacttgagtcctgctattcaatgggagagtcaataagatcctgtaggatcttatttggaactgactttgtcgattttaattttgttcctgcttgtttttaaattttcttgttgtttccctagaaaggaaagatgacgcttggttttaaatatttaaaaatgtgcaagttgctttgctataataaaactaaatgcatacatacaaaaaataacattatagttgatgtggtagtgtttggaattcaaaatataaatgcttagcatgaggtaatcctttatctttccacattttaccagtttgtaagtttgagtatgtaactgataaaatgtaattcaaaagcaagaagaatgttgtgtttcagtcctagagcaggggtcagtgaactttctgtaaagggccagatagtattatttaaggctttgtgaaccataagatccttgttgcaataactcagccctgtagttatagcacaaaagtagccattaacgatatgcagattgaaggggtgtagcagtgtcccactaaaattaattacaaaaaacaggtaatgggatgatttctcctacattatgaccttttttaaataaaaaagattgtgatagtctaaaatattttatatatattttgttgattcattcatctactgatggacatttaggtcatttctaaatgtaattttttttaattctttgttttagcttcaagaaacacaggatcaacttacagctactataagatgtactaaggggatggaaggcgacgcacaaaagtaaaatttgaagcagcgcacaaaataacttgagtatttataaagcaaaagagcactgtagtatgaaaattgtatcagttatgataataagtatgtctttgtgaagccaaaaaagtttcatttgtaagctgtattgaaatacatcatttttctacattattcctaaattttgcatattatcgacaaaacacagttagaaaaatgacacagtagcccaatcatctacttttgtgatcgctaagaatttgtgtaattataccttcagaagtttgtttagaatttacatgataaaaaaaattatgtgtgagagtaattattttaaaatgcacattttaggcttgaagtagaaaatgccatgatgagaaaaactattaaaaaacaggatgaccaaattgagcgacttgagaaaatcctgcagcgttcaagtttggtaagctgatctcttaatttctgtcatactgaaaaggaattttatttttccagtaggatgggttaaatatcccttgtccaaaatgcttgggaccaaaagtagatttttttcagattttggaatatttgtatatacctaatgaaatatcttggggaaggtacctgagtctaaacatgaaattcatttatgtttcatatataccttatgcacatagcctgaaggtaattctctacaatgttttacagtaattttttgcaggtaacaaagtttttactattttcaccagagcctgtcacatgaggtcaggtgtggaacgttgcagctgtggtgtcatgtccgtgctcaaaaagtttcagattgtagagcattttggatttcagatttttagattagggatgatcaatctacaatacagatgctccttgacttacagtgggtttacatgataatgtctcttgtttgactgaaacattataagtaatatttgctttatttcagatgccacaggtgttcaagagctagatgaaggtatgttgccaaaatttatgaattaaattcaaatcattgatttctgaaataaactctaagtagtgaacggtattcctctcaattgtttggttaataaatgctacattaaatattttttcttacacacatctagtgaaagatgtgaaaacataaacattcatagtgaagagtatacttatgctttgttaattcttcatgttccatagctttaaaaaaattgcaagaagtctgtgtatccctttttttctggccctacacttttcttctgccacccctatagaactgtcagcctgcacactgaaactgttctcagaaaacaaaggcatcatcaacttctcaaggttaaggtagtgatttaaggctaacagaccccacactcatgtgataataattagttaagcaattacaggtcacaagcagtcacttgtccagtgacattttaaatctctagtcatgactttgtcattggtttacttttgcccctgggaaaagttgaaaattccttagcatggaatcaaaactctcacatcagtgtggttcttgtcaggttattcagccttctctttcgccacttaccatactctgcacctttgttctatcatccagccaaactagactacatggagctccacagtgatcgtcttcacctccagctctttgcatttacttcttccctctatcctacatgtgttttccttccctttcagatatcaacctatgaattgcctctaccaaaaagcctacaatattgacacaaacctgggctagtatcccttctatgtcttctaataagtgctgtcttatgcctgtcactgtatgtatgactctgtatgggaattgcctgtttgttttttcagattatagcaaacagttgttgaggggtggaccatatcatctttatcttgtaattccagtgcttgtcctagtaccttagcacatggttgctgaatacatgaatgaagagtgagaaaccagaagctctgatatttaactgccgtgataatgaattcaatgtgcaactatgggcaaattgtatttaatagtaattgcatattgtacatatttttcattcttattaacactgataaacttttcaacttatactgactttaataaaattgtattactaggctattaacatgatattttgtttcccattaaatgtgacatgcaaagacgtttattaaatgaaaatatttttgtat

SEQ ID NO: 645 - DNA, 2106 bp, Homo sapiens
catgtatggatttggacaaatgtacaatgatgtgtatccatgttatataaattattttgacttccctaaaaatcctctgtgctctgcctatgtatcttttcctgctgtctcttaaaaggaaagattttgtcaactaaaaaaacaaaatatgttgcttcaacagcaactggatgatgctcgcaacaaagctgacaatcaagaaaaggcaatacttaatattcaagccagatgtgatgctagagtacaaaaccttcaagctgagtgcagaaagcgccgtcttttactagaagacagtaaaaggttggtaaatgaattgaatcatttgaaagaaaaagaacgccaatatgaaaaaaagcaagcagaaagagaacttcaagaaacacaggatcaacttacagctactataagatgtactaaggggatggaaggcgacgcacaaaagtaaaatttgaagcagcgcacaaaataacttgagtatttataaagcaaaagagcactgtagtatgaaaattgtatcagttatgataataagtatgtctttgtgaagccaaaaaagtttcatttgtaagctgtattgaaatacatcatttttctacattattcctaaattttgcatattatcgacaaaacacagttagaaaaatgacacagtagcccaatcatctacttttgtgatcgctaagaatttgtgtaattataccttcagaagtttgtttagaatttacatgataaaaaaaattatgtgtgagagtaattattttaaaatgcacattttaggcttgaagtagaaaatgccatgatgagaaaaactattaaaaaacaggatgaccaaattgagcgacttgagaaaatcctgcagcgttcaagtttgatgccacaggtgttcaagagctagatgaaggtatgttgccaaaatttatgaattaaattcaaatcattgatttctgaaataaactctaagtagtgaacggtattcctctcaattgtttggttaataaatgctacattaaatattttttcttacacacatctagtgaaagatgtgaaaacataaacattcatagtgaagagtatacttatgctttgttaattcttcatgttccatagctttaaaaaaattgcaagaagtctgtgtatccctttttttctggccctacacttttcttctgccacccctatagaactgtcagcctgcacactgaaactgttctcagaaaacaaaggcatcatcaacttctcaaggttaaggtagtgatttaaggctaacagaccccacactcatgtgataataattagttaagcaattacaggtcacaagcagtcacttgtccagtgacattttaaatctctagtcatgactttgtcattggtttacttttgcccctgggaaaagttgaaaattccttagcatggaatcaaaactctcacatcagtgtggttcttgtcaggttattcagccttctctttcgccacttaccatactctgcacctttgttctatcatccagccaaactagactacatggagctccacagtgatcgtcttcacctccagctctttgcatttacttcttccctctatcctacatgtgttttccttccctttcagatatcaacctatgaattgcctctaccaaaaagcctacaatattgacacaaacctgggctagtatcccttctatgtcttctaataagtgctgtcttatgcctgtcactgtatgtatgactctgtatgggaattgcctgtttgttttttcagattatagcaaacagttgttgaggggtggaccatatcatctttatcttgtaattccagtgcttgtcctagtaccttagcacatggttgctgaatacatgaatgaagagtgagaaaccagaagctctgatatttaactgccgtgataatgaattcaatgtgcaactatgggcaaattgtatttaatagtaattgcatattgtacatatttttcattcttattaacactgataaacttttcaacttatactgactttaataaaattgtattactaggctattaacatgatattttgtttcccattaaatgtgacatgcaaagacgtttattaaatgaaaatatttttgtat

SEQ ID NO: 646 - DNA, 2106 bp, Homo sapiens
catgtatggatttggacaaatgtacaatgatgtgtatccatgttatataaattattttgacttccctaaaaatcctctgtgctctgcctatgtatcttttcctgctgtctcttaaaaggaaagattttgtcaactaaaaaaacaaaatatgttgcttcaacagcaactggatgatgctcgcaacaaagctgacaatcaagaaaaggcaatacttaatattcaagccagatgtgatgctagagtacaaaaccttcaagctgagtgcagaaagcgccgtcttttactagaagacagtaaaaggttggtaaatgaattgaatcatttgaaagaaaaagaacgccaatatgaaaaaaagcaagcagaaagagaacttcaagaaacacaggatcaacttacagctactataagatgtactaaggggatggaaggcgacgcacaaaagtaaaatttgaagcagcgcacaaaataacttgagtatttataaagcaaaagagcactgtagtatgaaaattgtatcagttatgataataagtatgtctttgtgaagccgaaaaagtttcatttgtaagctgtattgaaatacatcatttttctacattattcctaaattttgcatattatcgacaaaacacagttagaaaaatgacacagtagcccaatcatctacttttgtgatcgctaagaatttgtgtaattataccttcagaagtttgtttagaatttacatgataaaaaaaattatgtgtgagagtaattattttaaaatgcacattttaggcttgaagtagaaaatgccatgatgagaaaaactattaaaaaacaggatgaccaaattgagcgacttgagaaaatcctgcagcgttcaagtttgatgccacaggtgttcaagagctagatgaaggtatgttgccaaaatttatgaattaaattcaaatcattgatttctgaaataaactctaagtagtgaacggtattcctctcaattgtttggttaataaatgctacattaaatattttttcttacacacatctagtgaaagatgtgaaaacataaacattcatagtgaagagtatacttatgctttgttaattcttcatgttccatagctttaaaaaaattgcaagaagtctgtgtatccctttttttctggccctacacttttcttctgccacccctatagaactgtcagcctgcacactgaaactgttctcagaaaacaaaggcatcatcaacttctcaaggttaaggtagtgatttaaggctaacagaccccacactcatgtgataataattagttaagcaattacaggtcacaagcagtcacttgtccagtgacattttaaatctctagtcatgactttgtcattggtttacttttgcccctgggaaaagttgaaaattccttagcatggaatcaaaactctcacatcagtgtggttcttgtcaggttattcagccttctctttcgccacttaccatactctgcacctttgttctatcatccagccaaactagactacatggagctccacagtgatcgtcttcacctccagctctttgcatttacttcttccctctatcctacatgtgttttccttccctttcagatatcaacctatgaattgcctctaccaaaaagcctacaatattgacacaaacctgggctagtatcccttctatgtcttctaataagtgctgtcttatgcctgtcactgtatgtatgactctgtatgggaattgcctgtttgttttttcagattatagcaaacagttgttgaggggtggaccatatcatctttatcttgtaattccagtgcttgtcctagtaccttagcacatggttgctgaatacatgaatgaagagtgagaaaccagaagctctgatatttaactgccgtgataatgaattcaatgtgcaactatgggcaaattgtatttaatagtaattgcatattgtacatatttttcattcttattaacactgataaacttttcaacttatactgactttaataaaattgtattactaggctattaacatgatattttgtttcccattaaatgtgacatgcaaagacgtttattaaatgaaaatatttttgtat

SEQ ID NO: 647 - DNA, 5390 bp, Homo sapiens
agagtctgtgcgaaggtaggtggacagactgcattgcttgttgttgcgcttcggaggcggcgatccccgaaggcgagctgaaatacggctggagcgttcccaggctacagtttgtagccgacgattgtggaagactaggagccggagaggtggcccaccctcagggagcgcttgtgctcggagggcttctcatttccccaataccacattaaatcgtctcatctgaggaggatccacagagctgtcttctatggtaatctggagaaactggagtaccttctgctcacgtatcatgacaccaatgagagagacaaggaggaaagcatccggtgaaagacagagatcacatttcaactagattcttaggaagtatggattcactaacttcagcgaagcttaccctgaaagaagcagatcccagttcaaaagtagccataagaaggaaggattcaccacctccaggaaaagtgtcttctcagaaacaaccagctgagaaggctgcaagtgacgagaaagattctgtttcgaatatagccacagaaataaaggagggaccaatatctgggacagtgtcttctcagaaacaaccagctgagaaggctgcaagtgacgagaaagattctgtttcaaatatagccacagaaataaaggatggacaacaatctgggagacataattttgcaaagcagatttaatgtcatgttcagccaagatagacaagaacttctcttccccgaataaatcagcgggggactctttgaagctgcacattctgattcagcaggcctgagattctacatttgtatgtcttctcagaaacaatcggcctggaaggttatatttaaaaagaaagtttctcttttgaatattgccacaagaataatgggtggtcagaaatctggaacagagtatcctgagaatctgcccaccatgaaggctacagttgaaaataaagattctgttctgaatacagccaccaaaatgaaggatgtacaaacatccacaccagaagaacaagacttagaaatggcatcagagggagagcaaaagaggcttgaagaatatgaaaataaccagccacagcaactggatgatgctcgcaacaaagctgacaatcaagaaaaggcaatacttaatattcaagccagatgtgatgctagagtacaaaaccttcaagctgagtgcagaaagcgccgtcttttactagaagacagtaaaaggttggtaaatgaattgaatcatttgaaagaaaaagaacgccaatatgaaaaaaagcaagcagaaagagaagtaagtatcaagaaaaataagtatttttcaaacttcctgaagtaaaatttaaagtaatatttggttacagctgaatgttggatctagttgaatataaaaaagatacatatgataaatatatctgctatatcagcttagaaacattccttttttccagcaagtcaaagttagaactgagagatgctttcctctgattaaagtcaatgtgtcacttataaaattttaagttataaaatgttaatatagactaatattaataatgtagtcttatactgctgaaataataattttaatgtatttatgttgcaacattttaagaccatgataaatcagatatatggaaatgctcatacctaaaatggtattttgaaattgattcaattaaatggggtactttgacagttaatttcagatttcctagatgaactgaagtgtattccctatttcataattacttttcttcagtagcttgaaatatgtctttgttggtaaaattttgtttttcttcatgtcaatttgacttaaatctgaaactatttcaatctcaaattatgtagagatatgatcattctattctttaaaggcgtctaattttacttatattataatatggggaaaatgcagtaaattttagccaaatcatgtttgattttatcttcccactggcatttataatttactttcagtttttaaacaaagaatttgctcataatttttatttcaaggctcaattactatcatttggatataactttgtccaggacaaagagaggcatagctatctgtgatttattagtttgacactggatccccgttttcagactaaggaggatttcagactaatgaggagtggcaggattcacgcagagtaggaatggagtgagtcagggaggagagatacagcagctgagtcagggcaggaggtggagggcaggttacttagagcatctaaggccactggagttttacttttcttctgagatagacatctattggaaggatttaagcagatgatttaatgtgaggaactctgaggttgatttgagtttgtaataaaaaaaagagggaaatcattccacaatgtagaatttaccaccatcagtctcacccacatactcatttctttttgagacttcagaaggtttttaagcattgcagattcatcaggggaggaatgactagtgggctgaatatgctatgtgaataacaataccagtttggcaggaagataacaccttctgtatccttaactggattcagtaatgaacagggacgtgtacacatgaggaaaagaaggtgaatcggtctgtgtggtggtatttttcaaagtgtatgctttagagttaaatattattaatggtttaataataaggtgatttgtaaaatcagtaacaaaaataacatcaggtagctgtgagacagctttaacaaaaatgagatgatgtcttaaacaaacaatcagcaacaaaagctttgctggatgcttcatcgcgtcactgcatctatttagaaaatgagatgcaggattcaaggaagaaattagaccagatgagaagtcaagtatgtatgcaactttgcacgccaacaactgttaatctgtagctggttaactaatataaagtgttttggggtactaattttagtggatggctttcttttgtatttttattataattaattttattaaaattttatagtggatggctttcttttgtattttccttattattaattttattacaattttattataatgccacctataccttaatctctggctttcattctgccgttttttatacatatgtttttttcttaaatatttaaccttaggaaagttgagaattatgcatcatttctcacataagttgagagagttttttttcctgttaaacagtctatttttaatgatttctctattggcatggtgaggcaagccagattaattcagaggataatgtctaatggaatgtttcagaaaattatcttatttttagtctctacttttctgaatgtataaagaacgtgtgtatacttatttcatagatttcaggttaacttgttcagaaaggccattttactgaataaatttttatttcgatgaaaatccttactctctttgtattgggctcagagagcacactctgtctctatatgaatatggacagttagcatttgccaacatgtatctattttctcttatttatagaaaaagctaaactaaaatgggggttataggtcagcaaaggatgggtttgagatgtttgggttggttgagtgggcatttagacaacaagccttctcctttggcgtgtttaatggacatctttgcagtttaagatgatgcttttaaattacttctctcctaatgatgacttgagtcctgctattcaatgggagagtcaataagatcctgtaggatcttatttggaactgactttgtcgattttaattttgttcctgcttgtttttaaattttcttgttgtttccctagaaaggaaagatgacgcttggttttaaatatttaaaaatgtgcaagttgctttgctataataaaactaaatgcatacatacaaaaaataacattatagttgatgtggtagtgtttggaattcaaaatataaatgcttagcatgaggtaatcctttatctttccacattttaccagtttgtaagtttgagtatgtaactgataaaatgtaattcaaaagcaagaagaatgttgtgtttcagtcctagagcaggggtcagtgaactttctgtaaagggccagatagtattatttaaggctttgtgaaccataagatccttgttgcaataactcagccctgtagttatagcacaaaagtagccattaacgatatgcagattgaaggggtgtagcagtgtcccactaaaattaattacaaaaaacaggtaatgggatgatttctcctacattatgaccttttttaaataaaaaagattgtgatagtctaaaatattttatatatattttgttgattcattcatctactgatggacatttaggtcatttctaaatgtaattttttttaattctttgttttagcttcaagaaacacaggatcaacttacagctactataagatgtactaaggggatggaaggcgacgcacaaaagtaaaatttgaagcagcgcacaaaataacttgagtatttataaagcaaaagagcactgtagtatgaaaattgtatcagttatgataataagtatgtctttgtgaagccgaaaaagtttcatttgtaagctgtattgaaatacatcatttttctacattattcctaaattttgcatattatcgacaaaacacagttagaaaaatgacacagtagcccaatcatctacttttgtgatcgctaagaatttgtgtaattataccttcagaagtttgtttagaatttacatgataaaaaaaattatgtgtgagagtaattattttaaaatgcacattttaggcttgaagtagaaaatgccatgatgagaaaaactattaaaaaacaggatgaccaaattgagcgacttgagaaaatcctgcagcgttcaagtttgatgccacaggtgttcaagagctagatgaagatatcaacctatgaattgcctctaccaaaaagcctacaatattgacacaaacctgggctagtatcccttctatgtcttctaataagtgctgtcttatgcctgtcactgtatgtatgactctgtatgggaattgcctgtttgttttttcagattatagcaaacagttgttgaggggtggaccatatcatctttatcttgtaattccagtgcttgtcctagtaccttagcacatggttgctgaatacatgaatgaagagtgagaaaccagaagctctgatatttaactgccgtgataatgaattcaatgtgcaactatgggcaaattgtatttaatagtaattgcatattgtacatatttttcattcttattaacactgataaacttttcaacttatactgactttaataaaattgtattactaggctattaacatgatattttgtttcccattaaatgtgacatgcaaagacgtttattaaatgaaaatatttttgtat

SEQ ID NO: 648 - DNA, 5881 bp, Homo sapiens
agacaagaacttctcttccccgaataaatcagcgggggactctttgaagctgcacattctgattcagcaggcctgagattctacatttgtatgtcttctcagaaacaatcggcctggaaggttatatttaaaaagaaagtttctcttttgaatattgccacaagaataatgggtggtcagaaatctggaacagagtatcctgagaatctgcccaccatgaaggctacagttgaaaataaagattctgttctgaatacagccaccaaaatgaaggatgtacaaacatccacaccagaagaacaagacttagaaatggcatcagagggagagcaaaagaggcttgaagaatatgaaaataaccagccacagcaactggatgatgctcgcaacaaagctgacaatcaagaaaaggcaatacttaatattcaagccagatgtgatgctagagtacaaaaccttcaagctgagtgcagaaagcgccgtcttttactagaagacagtaaaaggttggtaaatgaattgaatcatttgaaagaaaaagaacgccaatatgaaaaaaagcaagcagaaagagaagtaagtatcaagaaaaataagtatttttcaaacttcctgaagtaaaatttaaagtaatatttggttacagctgaatgttggatctagttgaatataaaaaagatacatatgataaatatatctgctatatcagcttagaaacattccttttttccagcaagtcaaagttagaactgagagatgctttcctctgattaaagtcaatgtgtcacttataaaattttaagttataaaatgttaatatagactaatattaataatgtagtcttatactgctgaaataataattttaatgtatttatgttgcaacattttaagaccatgataaatcagatatatggaaatgctcatacctaaaatggtattttgaaattgattcaattaaatggggtactttgacagttaatttcagatttcctagatgaactgaagtgtattccctatttcataattacttttcttcagtagcttgaaatatgtctttgttggtaaaattttgtttttcttcatgtcaatttgacttaaatctgaaactatttcaatctcaaattatgtagagatatgatcattctattctttaaaggcgtctaattttacttatattataatatggggaaaatgcagtaaattttagccaaatcatgtttgattttatcttcccactggcatttataatttactttcagtttttaaacaaagaatttgctcataatttttatttcaaggctcaattactatcatttggatataactttgtccaggacaaagagaggcatagctatctgtgatttattagtttgacactggatccccgttttcagactaaggaggatttcagactaatgaggagtggcaggattcacgcagagtaggaatggagtgagtcagggaggagagatacagcagctgagtcagggcaggaggtggagggcaggttacttagagcatctaaggccactggagttttacttttcttctgagatagacatctattggaaggatttaagcagatgatttaatgtgaggaactctgaggttgatttgagtttgtaataaaaaaaagagggaaatcattccacaatgtagaatttaccaccatcagtctcacccacatactcatttctttttgagacttcagaaggtttttaagcattgcagattcatcaggggaggaatgactagtgggctgaatatgctatgtgaataacaataccagtttggcaggaagataacaccttctgtatccttaactggattcagtaatgaacagggacgtgtacacatgaggaaaagaaggtgaatcggtctgtgtggtggtatttttcaaagtgtatgctttagagttaaatattattaatggtttaataataaggtgatttgtaaaatcagtaacaaaaataacatcaggtagctgtgagacagctttaacaaaaatgagatgatgtcttaaacaaacaatcagcaacaaaagctttgctggatgcttcatcgcgtcactgcatctatttagaaaatgagatgcaggattcaaggaagaaattagaccagatgagaagtcaagtatgtatgcaactttgcacgccaacaactgttaatctgtagctggttaactaatataaagtgttttggggtactaattttagtggatggctttcttttgtatttttattataattaattttattaaaattttatagtggatggctttcttttgtattttccttattattaattttattacaattttattataatgccacctataccttaatctctggctttcattctgccgttttttatacatatgtttttttcttaaatatttaaccttaggaaagttgagaattatgcatcatttctcacataagttgagagagttttttttcctgttaaacagtctatttttaatgatttctctattggcatggtgaggcaagccagattaattcagaggataatgtctaatggaatgtttcagaaaattatcttatttttagtctctacttttctgaatgtataaagaacgtgtgtatacttatttcatagatttcaggttaacttgttcagaaaggccattttactgaataaatttttatttcgatgaaaatccttactctctttgtattgggctcagagagcacactctgtctctatatgaatatggacagttagcatttgccaacatgtatctattttctcttatttatagaaaaagctaaactaaaatgggggttataggtcagcaaaggatgggtttgagatgtttgggttggttgagtgggcatttagacaacaagccttctcctttggcgtgtttaatggacatctttgcagtttaagatgatgcttttaaattacttctctcctaatgatgacttgagtcctgctattcaatgggagagtcaataagatcctgtaggatcttatttggaactgactttgtcgattttaattttgttcctgcttgtttttaaattttcttgttgtttccctagaaaggaaagatgacgcttggttttaaatatttaaaaatgtgcaagttgctttgctataataaaactaaatgcatacatacaaaaaataacattatagttgatgtggtagtgtttggaattcaaaatataaatgcttagcatgaggtaatcctttatctttccacattttaccagtttgtaagtttgagtatgtaactgataaaatgtaattcaaaagcaagaagaatgttgtgtttcagtcctagagcaggggtcagtgaactttctgtaaagggccagatagtattatttaaggctttgtgaaccataagatccttgttgcaataactcagccctgtagttatagcacaaaagtagccattaacgatatgcagattgaaggggtgtagcagtgtcccactaaaattaattacaaaaaacaggtaatgggatgatttctcctacattatgaccttttttaaataaaaaagattgtgatagtctaaaatattttatatatattttgttgattcattcatctactgatggacatttaggtcatttctaaatgtaattttttttaattctttgttttagcttcaagaaacacaggatcaacttacagctactataagatgtactaaggggatggaaggcgacgcacaaaagtaaaatttgaagcagcgcacaaaataacttgagtatttataaagcaaaagagcactgtagtatgaaaattgtatcagttatgataataagtatgtctttgtgaagccgaaaaagtttcatttgtaagctgtattgaaatacatcatttttctacattattcctaaattttgcatattatcgacaaaacacagttagaaaaatgacacagtagcccaatcatctacttttgtgatcgctaagaatttgtgtaattataccttcagaagtttgtttagaatttacatgataaaaaaaattatgtgtgagagtaattattttaaaatgcacattttaggcttgaagtagaaaatgccatgatgagaaaaactattaaaaaacaggatgaccaaattgagcgacttgagaaaatcctgcagcgttcaagtttggtaagctgatctcttaatttctgtcatactgaaaaggaattttatttttccagtaggatgggttaaatatcccttgtccaaaatgcttgggaccaaaagtagatttttttcagattttggaatatttgtatatacctaatgaaatatcttggggaaggtacctgagtctaaacatgaaattcatttatgtttcatatataccttatgcacatagcctgaaggtaattctctacaatgttttacagtaattttttgcaggtaacaaagtttttactattttcaccagagcctgtcacatgaggtcaggtgtggaacgttgcagctgtggtgtcatgtccgtgctcaaaaagtttcagattgtagagcattttggatttcagatttttagattagggatgatcaatctacaatacagatgctccttgacttacagtgggtttacatgataatgtctcttgtttgactgaaacattataagtaatatttgctttatttcagatgccacaggtgttcaagagctagatgaaggtatgttgccaaaatttatgaattaaattcaaatcattgatttctgaaataaactctaagtagtgaacggtattcctctcaattgtttggttaataaatgctacattaaatattttttcttacacacatctagtgaaagatgtgaaaacataaacattcatagtgaagagtatacttatgctttgttaattcttcatgttccatagctttaaaaaaattgcaagaagtctgtgtatccctttttttctggccctacacttttcttctgccacccctatagaactgtcagcctgcacactgaaactgttctcagaaaacaaaggcatcatcaacttctcaaggttaaggtagtgatttaaggctaacagaccccacactcatgtgataataattagttaagcaattacaggtcacaagcagtcacttgtccagtgacattttaaatctctagtcatgactttgtcattggtttacttttgcccctgggaaaagttgaaaattccttagcatggaatcaaaactctcacatcagtgtggttcttgtcaggttattcagccttctctttcgccacttaccatactctgcacctttgttctatcatccagccaaactagactacatggagctccacagtgatcgtcttcacctccagctctttgcatttacttcttccctctatcctacatgtgttttccttccctttcagatatcaacctatgaattgcctctaccaaaaagcctacaatattgacacaaacctgggctagtatcccttctatgtcttctaataagtgctgtcttatgcctgtcactgtatgtatgactctgtatgggaattgcctgtttgttttttcagattatagcaaacagttgttgaggggtggaccatatcatctttatcttgtaattccagtgcttgtcctagtaccttagcacatggttgctgaatacatgaatgaagagtgagaaaccagaagctctgatatttaactgccgtgataatgaattcaatgtgcaactatgggcaaattgtatttaatagtaattgcatattgtacatatttttcattcttattaacactgataaacttttcaacttatactgactttaataaaattgtattactaggctattaacatgatattttgtttcccattaaatgtgacatgcaaagacgtttattaaatgaaaatatttttgtat

SEQ ID NO: 649 - DNA, 159 bp, Homo sapiens
atgaagaaagaccaatgctgctttaaggcttttagtgaacatctgaagtgcccacaagacaacaacaaaagcagcatacattgtatggatttatctcaacgctattgtttaatggctgtgtttaatgtgatctatctggaaaatgaggactccgaataa

SEQ ID NO: 650 - DNA, 159 bp, Homo sapiens; identical to SEQ ID NO: 649

SEQ ID NO: 651 - DNA, 6485 bp, Homo sapiens
ctcgcccaagatggcgatggaggggcgggtgaggcggcagcggccctggcccccgcgccggccccagctcgggcccgggcccccgaggccgcgcccccgcccgcggcgccgcgcctccccgggccactgacgcccggcgcgctctccccccgcggcggcggccgaagcacggggaggcggcggcggcggcggcggcccgagcccagccccatggcgcggggggacgccggccgcggccgtgggctcctcgcgttgaccttctgcctgttggccgcgcgcggggagctgctgttgccccaggagacgactgtggagctgagctgtggagtggggccactgcaagtgatcctgggcccagagcaggctgcagtgctaaactgtagcctgggggctgctgccgctggaccccccaccagggtgacctggagcaaggatggggacaccctgctggagcacgaccacttacacctgctgcccaatggttccctgtggctgtcccagccactagcacccaatggcagtgacgagtcagtccctgaggctgtgggggtcattgaaggcaactattcgtgcctagcccacggccccctcggagtgctggccagccagactgctgtcgtcaagcttgccacactcgcagacttctctctgcacccggagtctcagacggtggaggagaacgggacagctcgctttgagtgccacattgaagggctgccagctcccatcattacttgggagaaggaccaggtgacattgcctgaggagcctcggctcatcgtgcttcccaacggcgtccttcagatcctggatgttcaggagagtgatgcaggcccctaccgctgcgtggccaccaactcagctcgccagcacttcagccaggaggccctactcagtgtggcccacagagggtccctggcgtccaccagggggcaggacgtggtcattgtggcagccccagagaacaccacagtggtgtctggccagagtgtggtgatggaatgtgtggcctcagctgaccccaccccttttgtgtcctgggtccgacaagacgggaagcccatctccacagatgtcatcgtcctgggccgcaccaacctactaattgccaacgcgcagccctggcactccggcgtctatgtctgccgcgccaacaagccccgcacgcgcgacttcgccactgcagccgctgagctccgtgtgctggcggctcccgccatcactcaggcgcccgaggcgctgtcgcggacgcgggcgagcacagcgcgcttcgtgtgccgcgcgtcgggggagccgcggccagcgctgcgctggctgcacaacggggcgccgctgcggcccaacgggcgcgtcaaggtccagggcggcggtggcagcctggtcatcacacagatcggcctgcaggacgccggctactaccagtgcgtggctgagaacagcgcgggaatggcgtgcgctgccgcgtcgctggccgtggtggtgcgcgaggggctgcccagcgcccccacgcgggtcactgctacgccactgagcagctccgctgtgttggtggcctgggagcggcccgagatgcacagcgagcagatcatcggcttctctctccactaccagaaggcacggggcatggacaatgtggaataccagtttgcagtgaacaacgacaccacagaactacaggttcgggacctggaacccaacacagattatgagttctacgtggtggcctactcccagctgggagccagccgcacctccaccccagcactggtgcacacactggatgatgtccccagtgcagcaccccagctctccctgtccagccccaacccttcggacatcagggtggcgtggctgcccctgccccccagcctgagcaatgggcaggtggtgaagtacaagatagaatacggtttgggaaaggaagatcagattttctctactgaggtgcgaggaaatgagacacagcttatgctgaactcgcttcagccaaacaaggtgtatcgagtacggatttcggctggtacagcagccggcttcggggccccctcccagtggatgcatcacaggacgcccagtatgcacaaccagagccatgtcccttttgcccctgcagagttgaaggtgcaggcaaagatggagtccctggtcgtgtcatggcagccaccccctcaccccacccagatctctggctacaaactatattggcgggaggtgggggctgaggaggaggccaatggcgatcgcctgccagggggccgtggagaccaggcttgggatgtggggcctgtccggctcaagaagaaagtgaagcagtatgagctgacccagctagtccctggccggctgtacgaggtgaagctcgtggctttcaacaaacatgaggatggctatgcagcagtgtggaagggcaagacggagaaggcgccggcaccagacatgcctatccagaggggaccacccctgcctccagcccacgtccatgcggaatcaaacagctccacatccatctggcttcggtggaaaaagccagatttcaccacagtcaagattgtcaactacactgtgcgcttcagcccctgggggctcaggaatgcctccctggtcacctattacaccagttctggagaagacatcctcattggcggcttgaagccattcaccaaatacgagtttgcagtgcagtctcacggcgtggacatggatgggcctttcggctctgtggtggagcgctccaccctgcctgaccggccctccacacccccatccgacctgcgactgagccccctgacaccgtccacggttcggctgcactggtgcccccccacagagcccaacggggagatcgtggagtatctgatcctgtacagcagcaaccacacgcagcctgagcaccagtggaccttgctcaccacgcagggaaacatcttcagtgctgaggtccatggcctggagagcgacactcggtacttcttcaagatgggggcgcgcacagaggtgggacctgggcctttctcccgcctgcaggatgtgatcacgctccaggagaagctgtcagactcgctggacatgcactcagtcacgggcatcatcgtgggtgtctgcctgggcctcctctgcctcctggcctgcatgtgtgctggcctgcgccgcagcccccacagggaatccctcccaggcctgtcctccaccgccacccccgggaatcccgcgctgtactccagagctcggcttggcccccccagccccccagctgcccatgaattggagtcccttgtgcacccccatccccaggactggtccccgccaccctcagacgtggaggacagggctgaagtgcacagccttatgggtggcggtgtttctgaaggccggagtcactccaaaagaaagatctcctgggctcaaccaagcgggctgagctgggctggttcctgggcaggctgtgagctgccccaggcaggcccccggccggctctgacccgggccctgctgccccctgctggaactgggcagacgctgttgctgcaggctctggtgtacgacgccataaagggcaatgggaggaagaagtcacccccagcctgcaggaaccaggtggaggctgaagtcattgtccactctgactttagtgcatctaacgggaaccctgacctccatctccaagacctggagcctgaggaccccctgcctccagaggctcctgatctcatctcgggtgttggggatccagggcagggggcagcctggctggacagggagttgggagggtgtgagctggcagcccccgggccagacagacttacctgcttgccagaggcagccagtgcttcctgctcctacccggacctccagccaggcgaggtgctagaggagacccctggagatagctgccagctcaaatccccctgccctctaggagccagcccaggcctgcccagatccccggtctcctcctctgcctagctcttcccagaggatgtggtttggggcaggcaggtatggatcacataggatgcgatacctgtggccgtgtatgtccacatgtgtgcctgtagatacatcatcaagccctttggagcttcctaagttgctttggctgaggggagaggaaaacatggattattcactccccccatactctttgtgatacacatgtgacatgtgaaagacatacgagacatagctacatgtgatgtgcacatgtgtgaagtgcatgtatgcgtactggttgttgagctgggaaaccgtggcccaggcagtggtcactacagcctgattggtcctccaggtcagaacggtgccccacagtggtcagtccccagccctgtgggcccccacctccatcgcccagccttttattacacactctgagagtgtctccaatgcctgtctgacaaagacagtcccagcccattctcctgtctggctgggttgggtgcaagcaggctctgaatgcctggcatttcagctgcatcacctcccagctccttattgcccaaatagagagggtggccctggctcccctccgagcaactctgcatttaattttgtaatctgggaagtgcctggttttgaaaatccgctttctctcactcttcccctccttccttgcccctggctgctctagtgttctgtctcccagtcacctcgctctcccagcaccagtgcccttctcctgctcccagatactctttcctttcctctctcctgttttccttcctctgctatctctcacacctctcccagactatgtcatcttgttctcctgcctgggttcaaactctgcatccttctctaacaacgtgactacctcatgtctgcttcaaggcccccgtgcccttcctgtatccgcggctgccgcgcactcgcctgccatcctcctgcctcctcttcactcagtgcttctgcttgccctgccccaggcagcccacccacgcccagtgcgggtgtggagaagatcttctggcttccctgcatcttgcctttgggattgggatccaagggttctccatggatggatccaagtcatagaggggaatgtttgagacagggaagggggctgtgatccagaggctcagaataaaaagatgccctcccttctatgcaggggggcaagtttactggatggagatgatttgggcctctcttccagaagaagctaaaggaagagaaggggagtgagagttcagggaggcccttcccaccctgtgaggcttgacttgatctggattggggatgacaggaatctcaccctctggggtgctggcaaggaggtctttgcacaggaaaaggggtagctcatttcagtttgttttttctttaaattgaatcctcaagtcattttctgttcacctgccgcacagggacaagcttgacttctattttctgtgtagtgaaaacaatgtcatttatttggtttttcacctcagccctctcataggagcatagaatgttagggtctttactccctaatgatgtctgattggcacatcaagagttaactctgccttctgggccaaattcgaaataaccagtccatttttccttttttttttttttttttttaaatggtggaatgtctctcagcacagttgcggcttcctcaaaccctgaaagcatctgtgtttattatactcgggtgtcactcactgttgatgtctgcacctacgtttccacctcctccccctccttcagccagcctatgataacactaaagattattaatgttggttttgtatctcgttaaagacagaattgtcacttgtagtatttctgtagcattcagcgctgctgtggctaacaccactgtgtatgtttcatcattgctctgaaggtcaaaagcctcattttattttgctggtttgattttttttttttaaagaagaaaaaaaaactgccctgaattaaatggctgttttaacagtaggctcttagcattataccacatagtcatttttcatgttcttgtttaacaggcactgaggttctggtttaaattaaatagctgcaaatgagacaatttataacccattaggttgggtggaaaattgtttctcaaaagcaaataagtaataaatctggtatctgcctataactcacagttgataagaaagtggccatttctcactagcactatatatgatttgggctctgggtaatttggaagtgttaggtttgtgtctttgtagcagtatttttattagaaaagaatctattggccttttacagggtattaatccctttgtcacctaccattgatgccttaagttttctgagtctcaattaaaaatcttccttttcttgatgcatgacaagtgtaatcagtacttgctcatttatttgtctgtatttagtttatgctgtactatttaattatccttccagcgttttttttttctccttacaaatatgatactctttagtgttaagctaaggcattgattcatgtatctgtccttataatgaattaataaactattttccag

SEQ ID NO: 652 - DNA, 1246 bp, Homo sapiens
gtgagggggcgcggtcaccgcccagggttcccacgaacgccaaggcggccacgtcctgctccccctggtgaagaagctgccctgggcttgtcgtcctagggtctccagacatgtctgaggtgaagagccggaagaagtcggggcccaagggagcccctgctgcggagcccgggaagcggagcgagggcgggaagacccccgtggcccggagcagcggaggcgggggctgggcagacccccgaacgtgcctgagcctgctgtcgctggggacgtgcctgggcctggcctgtggcagaaatctgaagctatcatggaacaattgaagtcttttcaaataattgctcatctaaagcgtctacaggaagaaattaatgaggtaaaaacttggtccaataggataactgaaaaacaggatatactgaacaacagtctgacgacgctttctcaagacattacaaaagtagaccaaagtacaacttccatggcaaaagatgttggtctcaagattacaagtgtaaaaacagatatacgacggatttcaggtttagtaactgatgtaatatcattgacagattctgtgcaagaactagaaaataaaatagagaaagtagaaaaaaatacagtaaaaaatataggtgatcttctttcaagcagtattgatcgaacagcaacgctccgaaagacagcatctgaaaattcacaaagaattaactctgttaagaagacgctaaccgaactaaagagtgacttcgacaaacatacagatagatttctaagcttagaaggtgacagagccaaagttctgaagacagtgacttttgcaaatgatctaaaaccaaaggtgtataatctaaagaaggacttttcccgtttagaaccattagtaaatgatttaacactacgcattgggagattggttaccgacttactacaaagagagaaagaaattgctttcttaagtgaaaaaatatctaatttaacaatagtccaagctgagattaaggatattaaagatgaaatagcacacatttcagatatgaattagtttgacattattgagattagactaaggtaatttttttaatgggacctctcatgagaagactggtaaatcaaaaataatgatattttggagcaaaagtcattttatatttaatcctattttgtacagtaaaaataaaactttaaaacaggttgattttccaaaataaatatgctaaaacctaaaaaaaaaaaaaaaaaaaaa

SEQ ID NO: 653 - DNA, 1364 bp, Homo sapiens
gtgagggggcgcggtcaccgcccagggttcccacgaacgccaaggcggccacgtcctgctccccctggtgaagaagctgccctgggcttgtcgtcctagggtctccagacatgtctgaggtgaagagccggaagaagtcggggcccaagggagcccctgctgcggagcccgggaagcggagcgagggcgggaagacccccgtggcccggagcagcggaggcgggggctgggcagacccccgaacgtgcctgagcctgctgtcgctggggacgtgcctgggcctggcctggtttgtatttcagcagtcagaaaaatttgcaaaggtggaaaaccaataccagttactgaaactagaaaccaatgaattccaacaacttcaaagtaaaatcagtttaatttcagaaaagtggcagaaatctgaagctatcatggaacaattgaagtcttttcaaataattgctcatctaaagcgtctacaggaagaaattaatgaggtaaaaacttggtccaataggataactgaaaaacaggatatactgaacaacagtctgacgacgctttctcaagacattacaaaagtagaccaaagtacaacttccatggcaaaagatgttggtctcaagattacaagtgtaaaaacagatatacgacggatttcaggtttagtaactgatgtaatatcattgacagattctgtgcaagaactagaaaataaaatagagaaagtagaaaaaaatacagtaaaaaatataggtgatcttctttcaagcagtattgatcgaacagcaacgctccgaaagacagcatctgaaaattcacaaagaattaactctgttaagaagacgctaaccgaactaaagagtgacttcgacaaacatacagatagatttctaagcttagaaggtgacagagccaaagttctgaagacagtgacttttgcaaatgatctaaaaccaaaggtgtataatctaaagaaggacttttcccgtttagaaccattagtaaatgatttaacactacgcattgggagattggttaccgacttactacaaagagagaaagaaattgctttcttaagtgaaaaaatatctaatttaacaatagtccaagctgagattaaggatattaaagatgaaatagcacacatttcagatatgaattagtttgacattattgagattagactaaggtaatttttttaatgggacctctcatgagaagactggtaaatcaaaaataatgatattttggagcaaaagtcattttatatttaatcctattttgtacagtaaaaataaaactttaaaacaggttgattttccaaaataaatatgctaaaacctaaaaaaaaaaaaaaaaaaaaa

SEQ ID NO: 654 - DNA, 845 bp, Homo sapiens
agcacacacacatctgcacctcaaccacagactacacttgctgaactggctcctggggccatgaggctgtcactgccactgctgctgctgctgctgggagcctgggccatcccagggggcctcggggacagggcgccactcacagccacagccccacaactggatgatgaggagatgtactcagcccacatgcccgctcacctgcgctgtgatgcctgcagagctgtggcttaccagatgtggcaaaatctggcaaaggcagagaccaaacttcatacctcaaactctggggggcggcgggagctgagcgagttggtctacacggatgtcctggaccggagctgctcccggaactggcaggactacggagttcgagaagtggaccaagtgaaacgtctcacaggcccaggacttagcgaggggccagagccaagcatcagcgtgatggtcacagggggcccctggcctaccaggctctccaggacatgtttgcactacttgggggagtttggagaagaccagatctatgaagcccaccaacaaggccgaggggctctggaggcattgctatgtgggggaccccagggggcctgctcagagaaggtgtcagccacaagagaagagctctagtcctggactctaccctcctctgaaagaagctggggcttgctctgacggtctccactcccgtctgcaggcagccaggagggcaggaagcccttgctctgtgctgccatcctgcctccctcctccagcctcagggcactcgggcctgggtgggagtcaacgccttcccctctggactcaaataaaacccagtgacctcaaaaaaaaaaaaaaaaaaa

SEQ ID NO: 655 - DNA, 845 bp, Homo sapiens; identical to SEQ ID NO: 654

SEQ ID NO: 656 - DNA, 4713 bp, Homo sapiens
ggaaatctggcattttttaaagtttgcgccccacaaagaggaaatattccaaaggtactcaggatgtaaaaggggagatcttcacagatgcctccgtggatggcatggcaatccatccatcaatgagaagaccatgatttcttttaattttctgtgtgtttccacattccccagtgagaattcttccacctttttttgtgccatgggaaaaacctgaagggcaggcagagctgctcccgaacttgtgaccttctctgaggttgcagcggctcttgtagaacatgactctgggacatcacttccttttgttttctttcggagctgaaccaaagaatgtgcaccctctttctctagtgctgtggtgtctgcttatttttgtatttgtgctttccatccatcttctgtgatcacaaggcattcttaaggttttctagcacgacttgcggacatccagactcgtggggggcccacccatggctcggtaagccagcagcccagggcactggcactaccatgaggcactgcattaattgctgcatacagctgttacccgacggcgcacacaagcagcaggtcaactgccaagggggcccccatcacggtcaccaggcgtgccccacgtgcaaaggagaaaacaaaattctgtttcgtgtggacagtaagcagatgaacttgcttgctgttctcgaagtgaggactgaagggaacgaaaactggggtgggtttttgcgcttcaaaaaggggaagcgatgtagcctcgtttttggactgataataatgaccttggtaatggcttcttacatcctttctggggcccaccaagagcttctgatctcatcacctttccattacggaggcttccccagcaaccccagcttgatggacagcgaaaacccaagtgacacaaaggagcatcaccaccaatcctctgtaaataatatttcatacatgaaggactatccaagcattaaattaattatcaacagcatcacaactaggattgagttcacgaccagacagctcccagacttagaagaccttaagaagcaggagttgcatatgttttcagtcatccccaacaaattccttccaaacagtaagagcccctgttggtacgaggagttctcggggcagaacaccaccgacccctacctcaccaactcctacgtgctctactccaagcgcttccgctccaccttcgacgccctgcgcaaggccttctggggccacctggcgcacgcgcacgggaagcacttccgcctgcgctgcctgccgcacttctacatcatagggcagcccaagtgcgggaccacagacctctatgaccgcctgcggctgcaccctgaggtcaagttctccgccatcaaggagccacactggtggacccggaagcgctttggaatcgtccgcctaagagatgggctgcgagaccgctatcccgtggaagattatctggacctctttgacctggccgcacaccagatccatcaaggactgcaggccagctctgcaaaggagcagagcaagatgaatacaatcattatcggggaggccagtgcctccacgatgtgggataataatgcctggacgttcttctacgacaacagcacggatggcgagccaccgtttctgacgcaggacttcatccacgcctttcagccaaatgccagactgattgtcatgctcagggaccctgtggagaggttgtactcagactatctctactttgcaagttcgaataaatccgcggacgacttccatgagaaagtgacagaagcactgcagctgtttgaaaattgcatgcttgattattcactgcgcgcctgcgtctacaacaacaccctcaacaacgccatgcctgtgaggctccaggttgggctctatgctgtgtaccttctggactggctcagcgtttttgacaagcaacagtttctcattcttcgcctggaagatcatgcatccaacgtcaagtacaccatgcacaaggtcttccagtttctgaacctagggcccttaagtgagaagcaggaggctttgatgaccaagagccccgcatccaatgcacggcgtcccgaggaccggaacctggggcccatgtggcccatcacacagaagattctgcgggatttctacaggcccttcaacgctaggctggcgcaggtcctcgcggatgaggcgtttgcgtggaagacgacgtgagagctgaattgttgctgcacgtgctgggcccgccaatgccgtcatcatcaggattttacaaatctctttgcggggaactgtttcactcatggtatggaaaaccccaggactctgccactctaggcacacatgaattataaccattttggaatttccttcgtgatgttcgagagctcagcaatggacccctcacagagctcctctatccgaggccattggagaccccagtttctcaagaattcagctctgctctgagcgtcctggagcttggggatgcagccagctggcctgcactgggtgtggagagaacacctagggaaggcagcctggccctgcccgcctccgccttctggagagcctctgggttctgagtcagcaagccagaggtcatgccacaggcctggctggaacttacacttcacgttccctttttttccccctagagatggggtctcgccgtgttgcacagactgtctgtattcaatggctatcttcacaggtgtgatcataccacattcacttctgaaacactcttgttgcgatcgctaacctcactgggacagagaaccgcagtctttcgagaatggaggctcttcattttttttttctcctttactccaaactcagccctccagtttcttcagatgtaaaccctgttaacgtcactgtttccaaaaggaaaaaaataagtcagtttttggcagcaccttcatctttctgacctcctcctattctgtccttgtggacttatgtttaacatagaaaatgaatgcgtttaaaacaaaaccactttctgcatttaaccagtcctggctctctctctgctgcctcttcatacgttttctcaagaacttcagtttataattggaagagaaatttttgctgttaatgccagaatgagcaacctcaaggaattgaacacttcttggaaaatctaggtaattcaagccctcatcaggtttacaagatcatcagagaaacagaggattttaatttttagttctggccggctacaggctccatttctctgccttcccattggaaatagtttatttccacattctccactgcgtgtggtcaaagttcctcacccagcaagggactatagatactcgtgtcccaattccaaaacacaatgcacaagctgaacttgggctgaacgtggcgtgttgagatttggaatgaggtttctaagagccgtgttcttcatggaattttccaggccacttggcagcttggtttaccgatggatgggctagagatcttgtcgtttcttggaagtcacagggaagattgaagagaacgcttgagcatccttggcaacagcccaggtgggacctggatgaagctttgcactcaagtattgtcaagggaagcttcctgtgaaccaaagttctcaggccaaggtctcgcccaccaaagccagaaagtgcaagcacccgtctacccagctctaacttgtatgtgtgagacagaccaggcttcgggggtaggaggatctgcagttgttcagccgtctttctgctggtgttgtctttctgccatcagagaagggacacacagcccgttcgaaggtgtgcagagggctctgagcgccaggatggccagggctgtttttgctactgaaggagcgtgtgtcctgaactcccacttgcagggacagtccccaccttctctatagccggcactgggagcagccgccagcagggaaatctggcctgagcacaaggatgctttagggagagatcacttcagtgtgtgtgtatatttatttgcagtacagtgcgcgcgtgtgtgtgtgtgtacgcgcacgtgtgggtgagtgcgtcttctgagtgggttctgttcagttgctaatgaggctcctccgctctggacacaacccttttatagattaatttctctgccaattaacttgtcattttcagtacatattttactattccacaccaaccataattacaacaagggatttttcttatgcactcctatgcatgtgaataacatgtggtgtaattctgcttcttacagaagtattactgaaggtattatttccaatattatttggtttattatgcggatcttttttatatatgcagtcccatcccttctgtgccactcaatgccatccagacatggtttttccctccaggggcctttctctccagagggcacttcggctgcctctgcttcctctcattcgaggcccggctcttgctgacagaataggttccgttctgggcggtggttctcgagcctgccattcaaaaccaaagcaaattggagcatttctcacaacatggtattgaagttcctttttgttctcaaaagttgtgaccgtgttaaattgtactcccttagtcctgtaaggtatgttaagtgaatcgcagttacgctgtacttttattaatatttaacataattaaagatggacccataagagtgacgcctgtggagcgcgtgctcttcctctgcagccaaaaaaaaaaaaaaaaaaaaaaaaaaaaaaaaaaa

SEQ ID NO: 657 - DNA, 3553 bp, Homo sapiens
gagccagcgcggtagggccagagtgggaaggccagagcgggcgtccccgccagtgaccccacgccgcccgtccgcgcccaacccggcctccgccgagtgtccaaaccaaaagcgaaaggaacccgaccccgcgtcccctccggcggctccgtagtcgcgtccgcttggagctcgccgggcgcctccgaccctgccgggccgctttgtgacttcactcgtttcgcaacaagcccgggcagcccgcgccccacccactctggcccggcagcctcgccgcccgcagcctcgctccgctcctcgcgcttcccctccctccggggctgggcctgccccggccgtcgcggagcctcccctcccaccgtccgtgagtgtacgcgcccggccgccgcctccaggcagcccggagcaacccggcgcccggccccgctgggcgcagcactccgtcggcggcggcggcggcgcgatgctgtgcttcctgaggggaatggctttcgtccccttcctcttggtgacctggtcgtcagccgccttcattatctcctacgtggtcgccgtgctctccgggcacgtcaaccccttcctcccgtatatcagtgatacgggaacaacacctccagagagtggtatttttggatttatgataaacttctctgcatttcttggtgcagccacgatgtatacaagatacaaaatagtacagaagcaaaatcaaacctgctatttcagcactcctgtttttaacttggtgtctttagtgcttggattggtgggatgtttcggaatgggcattgtcgccaattttcaggagttagctgtgccagtggttcatgacgggggcgctcttttggcctttgtctgtggtgtcgtgtacacgctcctacagtccatcatctcttacaaatcatgtccccagtggaacagtctctcgacatgccacatacggatggtcatctctgccgtttcttgcgcagctgtcatccccatgattgtctgtgcttcactaatttccataaccaagctggagtggaatccaagagaaaaggattatgtatatcacgtagtgagtgcgatctgtgaatggacagtggcctttggttttattttctacttcctaactttcatccaagatttccagagtgtcaccctaaggatatccacagaaatcaatggtgatatttgaagaaagaagaattcagtctcactcagtgaatgtcgcaggccatttctaaaagtgctacagaggacagacagggttttgaggccaccctgattattgggatgcatctgcagcacatccaggacttgaatttcattacgagttcctaatagttgtatttctaaagatgtgtttcctagagaatgtacagccttatgacactgtagtgatgtttttataattttctaagtagatttttttatattaacaaattcatatacagaaaaaataaggtgttacaaaaaatggagagctcttatttttgtacagattctgtcgtttttgttttatttgtgtgagatttatggaaatacactaaatgagtaattcaggttcagtacatttattacaaagtgaaatcaggggatattcatttgtaaattttattcttagtgaatgaactgtataattttttttatcaggagagcacttataaaattcaatttataaagatcatatacccaaatcataaagatttagttgatacattaacactaagatactctgatttttagccgaactaaacaaagtgcttctactgagaggcctttataccaccatgtacagtaactctaagtgaatacggaagaccttggttttgaaattctgccaccttgtttctccctgctcatgaggtcgcaccttttgctcttgctgctaattgcccattcgtagtgggtgtaatgccaggtggaatggtttcaacaagtcaggtgaaaaccatcctttattgttgctggcacaacttgatatatagtctgactcagaactgaagctcacatctcaaattcatttcatgccagtaaatgtggcaaagagaagaaaggcccaagagcgagacaagaagaatggagaagggggcagccaagaagaacttctgggttcagggtactgtttatttgctccttctcttcatgcctgtggctggatgtcccacaacactataagaaatataagtcaagccctttgtgttaagcaagaactacagactccatcttttcacccaaatcatgaatgaccaataaaaagcaagttattccagaggaagaagcagcccttgaaatgttaaggcttaggcttgaaaggtgaagagcaggaattctctctttcaaatcctagagcataaacccatgtgtggccaagtgagatcagccctcaagggcacatgccaagggcagagcagcccatgtagacagcttcggagggcatgggggtgtagggagttcggggtagctcctcattaactatttgttgggtgagtaaaggggtgaggctcagtggcaggtacctctgcaatgacaagctgcctcccctctatgtgtttagcatatgttattagaacatgtccgacacccctaccgctgccatttgggccctttaataaagccaagtagagaaatctggcaataaaaggcaaatgtaagcatgctttctttaagacgcatcataaatggttttctttaagtgaatggaagagtttgacagagatacacctttgtaagaaaacattaagaatgctggctggctgtggtggctcacacctgtattcccagcactttgggaggcctaggcaggaggattgcttgagcctgggacttcgagaccagactgggaaacatggcaaaatcccatctctacaacaaaaatacaaaaattagccaagtgcggtggtgtgcctgtagtcctagttacttgggaggctgaggtgggagaatcacctgagcccaggaggtggaggctgcagtgagccatgccaatgcactccagtctgggcaacagagtgagaccctgtctcaaaaataaataaataaataaatgaataaagagaatgctaatcatttctgggttcactgcgactcactgtagtgctggggatcccccttgtaacactggaactgaaagacagtgatgaaagctatgtcaagcattcattattctgaagaggaggagaaatgccacatacctttcccatgggacctgtggtggaatgaatccatacttctgcctcacttcgagcagacttttgttctcggcgctcctcacgatggagtttcatgcttcattttcacatctctctgcacaattagattgggagctccttgagggcagagtacgtgccttaatctttatctttgtaatgccacaatgaacagagtgcctcctggtacactgtaggagcttaagaaatactcactgaatgcatgaatgaatgaatgaacaaatgaaggaatgactaaggatgtttgtagtgctataatatagaatgggatttactctgctttaccagttagtttcataataaacaaatagtctgtatcgcctggtaaaaaaaaaaaa

SEQ ID NO: 658 - DNA, 396 bp, Homo sapiens
tcccagtcaggacacagcatggacatgagggtccccgctcagctcctggggctcctactgctctgggtcccaggtgccagatgtgacatccagttgacccagtctccatcctccctgtctgcatctgtaggagacagagtcaccatcacttgccgggtgagtcagggcattagcagttatttaaattggtatcggcagaaaccagggaaagttcctaagctcctgatctatagtgcatccaatttgcaatctggagtcccatctcggttcagtggcagtggatctgggacagatttcactctcactatcagcagcctgcagcctgaagatgttgcaacttattacggtcaacggacttacaatgcccctcccacagtgttacaaggcataacataa

SEQ ID NO: 659 - DNA, 739 bp, Homo sapiens
cgtggcgcagcgactcggaggttcgcctccagcttgcgcatcatctgcggccgggtcccgatgagcctcctgttgcctccgctggcgctgctgctgcttctcgcggcgcttgtggccccagccacagccgccactgcctaccggccggactggaaccgtctgagcggcctaacccgcgcccgggtagagacctgcgggggatgacagctgaaccgcctaaaggaggtgaaggctttcgtcacgcaggacattccattctatcacaacctggtgatgaaacacctccctggggccgaccctgagctcgtgctgctgggccgccgctacgaggaactagagcgcatcccactcagtgaaatgacccgcgaagagatcaatgcgctagtgcaggagctcggcttctaccgcaaggcggcgcccgacgcgcaggtgccccccgagtacgtgtgggcgcccgcgaagcccccagaggaaacttcggaccacgctgacctgtaggtccgggggcgcggcggagctgggacctacctgcctgagtcctggagacagaatgaagcgctcagcatcccgggaatacttctcttgctgagagccgatgcccgtccccgggccagcagggatggggttggggaggttctcccaaccccactttcttccttccccagctccactaaattccctcctgccttaaaaaaaaaaaaaaaaaaaaaaaaaaaaaaaaaaaaaaaaaaaaaaaaaa

SEQ ID NO: 660 - DNA, 1515 bp, Homo sapiens
aatttgtttgccctctagggtagaatccgccaagctttgagagaaggctgtgactgctgtgctctgggcgccagctcgctccagggagtgatgggaatcctgtcattcttacctgtccttgccactgagagtgactgggctgactgcaagtccccccagccttggggtcatatgcttctgtggacagctgtgctattcctggctcctgttgctgggacacctgcagctcccccaaaggctgtgctgaaactcgagccccagtggatcaacgtgctccaagaggactctgtgactctgacatgccgggggactcacagccctgagagcgactccattccgtggttccacaatgggaatctcattcccacccacacgcagcccagctacaggttcaaggccaacaacaatgacagcggggagtacacgtgccagactggccagaccagcctcagcgaccctgtgcatctgactgtgctttctgagtggctggtgctccagacccctcacctggagttccaggagggagaaaccatcgtgctgaggtgccacagctggaaggacaagcctctggtcaaggtcacattcttccagaatggaaaatccaagaaattttcccgttcggatcccaacttctccatcccacaagcaaaccacagtcacagtggtgattaccactgcacaggaaacataggctacacgctgtactcatccaagcctgtgaccatcactgtccaagctcccagctcttcaccgatggggatcattgtggctgtggtcactgggattgctgtagcggccattgttgctgctgtagtggccttgatctactgcaggaaaaagcggatttcagccaattccactgatcctgtgaaggctgcccaatttgagatgctttcctgcacccacctggacgtcaaatgattgccatcagaaagagacaacctgaagaaaccaacaatgactatgaaacagctgacggcggctacatgactctgaaccccagggcacctactgacgatgataaaaacatctacctgactcttcctcccaacgaccatgtcaacagtaataactaaagagtaacgttatgccatgtggtcacactctcagcttgctgagtggatgacaaaaagaggggaattgttaaaggaaaatttaaatggagactggaaaaattcctgagcaaacaaaaccacctggcccttagaaatagctttaactttgcttaaactacaaacacaagcaaaacttcacggggtcatactacatacaagcataagcaaaacttaacttggatgatttctggtaaatgcttatgttagaaataagacaaccccagccaatcacaagcagcctactaacatataattaggtgactagggactttctaagaagatacctacccccaaaaaacaattatgtaattgaaaacccatcgattgcctttattttgcttccacattttcccaataaatacttgcctgtgacattttgccactggaacactaaacttca

SEQ ID NO: 661 - DNA, 3090 bp, Homo sapiens
tttacaaaggccccgggcgcgagaggacgtgctctgccagccagtgggaaggcaggccgcgcgcgcgggagcgcgggaggatcggcggctcgcggtcactggtccctggctcggttccccgcaccccggggctcacacttacccgcgcggaggagcagcggccgggtgtccacccccatcctgcgcccagtctcctcgattcccctcgctctgagccgggagagccgaacagctgaagagagttcactgactccccagccccaggtgggccttgtgcacatcatgaccagttttgaagatgctgacacagaagagacagtaacttgtctccagatgacggtttaccatcctggccagttgcagtgtggaatatttcagtcaataagttttaacagagagaaactcccttccagcgaagtggtgaaatttggccgaaattccaacatctgtcattatacttttcaggacaaacaggtttcccgagttcagttttctctgcagctgtttaaaaaattcaacagctcagttctctcctttgaaataaaaaatatgagtaaaaagaccaatctgatcgtggacagcagagagctgggctacctaaataaaatggacctgccatacaggtgcatggtcagattcggagagtatcagtttctgatggagaaggaagatggcgagtcattggaattttttgagactcaatttattttatctccaagatcactcttgcaagaaaacaactggccaccacacaggcccataccggagtatggcacttattcgctctgctcctcccaaagcagttctccgacagaaatggatgaaaatgagtcatgaacacagaaagtctaagaggagaaatatgatggatgaagagctctgtagatgctgtatagacactaaataagagttgattagggtagtatattatagtcatctgttatgctgtgaaatttggaattcagtattatcattttgaagtctgtaaattgtgttagtcattaacttagtcacctgttgtattctggatctacacaaaattattttaactgctcttattaatctgtgaggattaatatacaaaaagtatcctttgagatgaagtcgtgttctcaaaataaggttatattattttctttttctgcttgattttcatcttgtgttttgctttgtttttgtaaggaaccatctcttggtttggtcacatcagttcacaacagccatttgttttcaaggtcaaggctccaggcaggttgttactggtgtttgcagcctgtcagtacttgcagtactggaataggttctaggctagtgtctgcgcgtcactgtggttttagcatgggaggacttatttgagaaatactaccttacttttctatgatttctttttacagagttatagtgtgtttactcctaagatgacagttctctttgtctatattcagcatctaagacaaatatttaaacattttaaagaaccactgtgttaagtttaggattatttacttaccaaattagaagtttgacttttatgtgttatacacaatcttaaaatttcacgaattcacctttttaatagtatccatgtacataataaaatcaaagtttaattagccattttctttgaatttttttctaaataagggaaataactgttcttgggccactttacagagataaatgtatgtgaatgtttatgataaacgcttaaatatttctaaaatattaacttcaaaaaagtctttttcagttcttaaataaaaatttatttatttaagatacttattcgacttatcttaactaaggtagctatgaatgttaagtagatgaggtaaccattcagttaagttaaattgtagcattgccaggtagtgaggctcactgtacaattttccaggtaaatgaaatttcctgtagtaagaggtccgtatttttgtaacagccttttaaaaatgcttttgggaaccctccagcctcttaccaaaagaggctttaaacctcatcttgattcagactgtcagtctattcctgggcagtagtatgtgatgtccagcaccctaaccccgactccccagccctgggactattccagtagagtgaaatatttgtccctgtacaaagtggcctgaatgactgttggagttcctgtgtctggttttcctgtttattccctgtgatgcccagagtaatggcccatccaaagatgtccagatgtccatgtgctagtctccagaacttgtaactgtgttgttatgtggcaaaggggaatgaaggctgcagatggaagtaaaatagattatgctggattatctgggtgtgcccaattgatcaccggatccgtaaaagtggaagagaggcagatcaggatgtcagcgtgatgaggtgtgagacagacttgacttgctgttgctgggaggaaggggaggtcatgagccaaggaatgtggacagtctcttgaagctggaaagtgtgcattggacatctggaagccagaaaagacaaagaaatatccagaaaggaacaaagtcttgtggacaccttgattttggtccagtgagaatatgtttgacttgttaacctacaaaactttatgatgataaatttgtgttggtcgtaagccactaaatcacagtaatttgttatagcagcagatagaaaactaatatactccctttaatataaggttatctactattgattctttctaggattttagcttctggtctgatgtgggtttacagccagatcacccggcttgaattgcttacagtgtgtagtctcatggtaaaggcgttctatgagtgaagtgtatatactttaatgtgtgtatactgtcacattttgactattttggaagactttcacctctgtttcttgtctttgaggctgatgaatgtgtttctaagttataaatttaatattaagggattcatgtattattgttattgaatccaaacaatgtgttaagtaatatttagggccagaaaaatcttgtacagaataatgatttctcctaatgtaaatcttggaaagggttttgttcaacttgagaaatattaaattttttattctaaaaaaaaaaaaaaaaaa

SEQ ID NO: 662 - DNA, 783 bp, Homo sapiens
atgtctctgcaagttattctgctagcactcagggtgcccggggctccttctcgcctggatggggcgggggaggcaccttggggaacagaacacagcccgggcctggctgtcaggagcatcaggctcggtcgccacccgcagggacaaaagcctgggcggcctcaggcagagcatcttcctgaggcgcaggaactggcgccctcggcagagtgggacagtggccttgccgctggccgggtcctcaaagtccacactatcacgattaaattccaggctgatgacactgtgagggcgtatggccagctgtgctggaggactggtcgaggccagagcctgggtttacagagaagagtgcaacctaaggggactatgtatcctgcaaagaccgagcccctgcatcaccgcaaccccctggtctgctctgtgagtggtttctatccaggcagcattgaagtcaggtggttccagaatggtcaggaagagaaggctgcggtggtctccataggcctgatccagaatggagattggaccttccagaccctggtgatgctggaaacagttcctcggagtggagaggtttacacctgccaagtggagcatccaagcgtgacgagccctctcacagtggaatggagtgcacggactgaatctgcacagagcaagatgctgagtggagttgggggctttgtgctgggcctgctcttccttgggacagggctgttcatctacttcaggaatcagaaaggacactctggacttcagccaacaggtaataccttttaa

SEQ ID NO: 663 - DNA, 2657 bp, Homo sapiens
ggctggtgtttgtcctaagtgggtacttgcttgggttgagaaatcacattttggctattccccgacttgaaccaggggatagaaatcgtagtcaccggctgggcgcagcggctcatgctgtaatcctggcagtttgggaggccgaggcgggcagattattgaggttaggagttcgagaccagcctggtcaatatgatgaaacaccgcctctagtaaaaatacaaaaattatccgggcgtggtggcgagcgcctgtaatcccagctactcaggaggctgaggcagtagaatcccttgaacctggggtgcggaggttgcagtgagccaagatcgcgccactgcactccaggctgggcgacacggcgagactctgtctcaaaacaaaacaaaaggaaaagaagagaaaagaaaaagaaacgcaggcaccctgaaatcgaaacttgttaggaccaacaagccaacgacagacgaatctgcggggtcctgcgacagacacgccagccccgccgccacagcacagggttctggaggtcgagctgttctgcgggttctgcggcggcgctgggaagagacggcgcccgggcagctcccctgtcaccggcttggaggagcggcgggctcccctagcccagcgccgccgccgccgcccgggaacgccaggctcaccccagctggggaagctccgaatccctcagatcggcgacctgagtgctgtcgccccgagaaaatggaggcatcgagcaacgagctgtgctgagaccgagagacctcagttctgcgaaatgtcggtgcctggagcttgcgaatgactgcggccggcgggttgtcaaggacaacattccttatggcgcaaccaacagcgctgtcaccaagaaactggactctgagaaaaaagagggtttcggccaccgagaaactccgtgccacatgtgccgtgacagcaaaaccgcccgctccgcgccgctggtgaaagagctaacgaacgccaggtgctgcgacagtgacaccgggactagaaggcctcggatggagaatgggacgcccagagcaagcaggaaaacgttttgtttggctcaactagcgctgtcgcaaccggaaaactgtcaggccagtgctgctgcggatgtgagaaaccggtgatccgaaggcggagtggcgctgggcgctggactcgctggtgtgaaaatctggctgctctaggacccggcaagcgcgggcaccaggcgaacgccagcgactttgccagacaaatgcatgtcttttttggtcgccattcaaagatgcagccggcagtcagccccggctctgagaaacaagtggaggtgtcagccataaaccctccgttcagggaaaagagagtcgctgcgacggatcgactggccgttgggtggaactttctttggtggcctagtgactagaaaataaaaacgaaaacgaaataaaaaactgctactgacattactcccacgctccctcctcaagtcagtggcttcaggcttaagaaaacctgtatttttcttggctgatccgtgatccctaattactgagggccccgcgacccaccaagtgcgattcgcagagggaaaggagctggaataaggatccagaatgggacggatttggctcctccaggaagaaagcaaaacaaatgcaggtcgcgaacactttacattgcaggaagctgctcttccagtggccgcggctgggtccttccacaccacctctctgtcctaggccttcgtcccggttcagccctcacggattctaggctagcggtcaacaaccgcatccctccggaacctggaaactctaggtccgagatctcggtgaagaatgaaaggcacagcgccgctcaacccaggcttcaggcctgccccgctggtcccgtcccttccctgtgggatggaactctgtgggaatcgctccttattctgatggttcactcattcagatgtccttgatatttggggatatttctaaaacagctggggagaaaaatggactgcgaggctccggtgttggacgtgaaattggcagtgagacatccgcctctaagcccagggaaaagcttaaattgtggttctctgtctctagcaccgtgatctttgaaatgcgttattgattttcttctttcttctgggaaatgcaatgcaggtgaacttgtaagtgttgaatcctccctctcctcactgttcaatcagactgaggcctacttcctttctgataagaaatatggaactgccattgctcagtaggaaaatgtcctttctacaagcattcatatttcaataaaaatctgcactttgtgagttgagccccctcaaagagacctacagaccctgccatgagcatctccatccacactcatcatttcccattttcaccacttctgctcctgtgcaaaccagtactatccttttctgggggatcctaggcagaagcgatggcaggacaaaggcagagaaggcactgccaggtcctgcatgccagtaaaactactcatgtcagctgttctgcaggatcccatgagaagatggcctaattggattatttcagcaagctaagtaatttgaagagagaggctaagccaatgtagtactagagctacactggccttctttggcttaacatttgtctggaattataatttcctcaatc

SEQ ID NO: 664 - DNA, 2718 bp, Homo sapiens
cctttctgtggcgaaacatcgacttcctacgacctagaaatcgccgccagggctaggctggtgtttgtcctaagtgggtacttgcttgggttgagaaatcacattttggctattccccgacttgaaccaggggatagaaatcgtagtcaccggctgggcgcagcggctcatgctgtaatcctggcagtttgggaggccgaggcgggcagattattgaggttaggagttcgagaccagcctggtcaatatgatgaaacaccgcctctagtaaaaatacaaaaattatccgggcgtggtggcgagcgcctgtaatcccagctactcaggaggctgaggcagtagaatcccttgaacctggggtgcggaggttgcagtgagccaagatcgcgccactgcactccaggctgggcgacacggcgagactctgtctcaaaacaaaacaaaaggaaaagaagagaaaagaaaaagaaacgcaggcaccctgaaatcgaaacttgttaggaccaacaagccaacgacagacgaatctgcggggtcctgcgacagacacgccagccccgccgccacagcacagggttctggaggtcgagctgttctgcgggttctgcggcggcgctgggaagagacggcgcccgggcagctcccctgtcaccggcttggaggagcggcgggctcccctagcccagcgccgccgccgccgcccgggaacgccaggctcaccccagctggggaagctccgaatccctcagatcggcgacctgagtgctgtcgccccgagaaaatggaggcatcgagcaacgagctgtgctgagaccgagagacctcagttctgcgaaatgtcggtgcctggagcttgcgaatgactgcggccggcgggttgtcaaggacaacattccttatggcgcaaccaacagcgctgtcaccaagaaactggactctgagaaaaaagagggtttcggccaccgagaaactccgtgccacatgtgccgtgacagcaaaaccgcccgctccgcgccgctggtgaaagagctaacgaacgccaggtgctgcgacagtgacaccgggactagaaggcctcggatggagaatgggacgcccagagcaagcaggaaaacgttttgtttggctcaactagcgctgtcgcaaccggaaaactgtcaggccagtgctgctgcggatgtgagaaaccggtgatccgaaggaggagtggcgctgggcgctggactcgctggtgtgaaaatctggctgctctaggacccggcaagcgcgggcaccaggcgaacgccagcgactttgccagacaaatgcatgtcttttttggtcgccattcaaagatgcagccggcagtcagccccggctctgagaaacaagtggaggtgtcagccataaaccctccgttcagggaaaagagagtcgctgcgacggatcgattggccgttgggtggaactttctttggtggcctagtgactagaaaataaaaacgaaaacgaaataaaaaactgctactgacattactcccacgctccctcctcaagtcagtggcttcaggcttaagaaaacctgtatttttcttggctgatccgtgatccctaattactgagggccccgcgacccaccaagtgcgattcgcagagggaaaggagctggaataaggatccagaatgggacggatttggctcctccaggaagaaagcaaaacaaatgcaggtcgcgaacactttacattgcaggaagctgctcttccagtggccgcggctgggtccttccacaccacctctctgtcctaggccttcgtcccggttcagccctcacggattctaggctagcggtcaacaaccgcatccctccggaacctggaaactctaggtccgagatctcggtgaagaatgaaaggcacagcgccgctcaacccaggcttcaggcctgccccgctggtcccgtcccttccctgtgggatggaactctgtgggaatcgctccttattctgatggttcactcattcagatgtccttgatatttggggatatttctaaaacagctggggagaaaaatggactgcgaggctccggtgttggacgtgaaattggcagtgagacatccgcctctaagcccagggaaaagcttaaattgtggttctctgtctctagcaccgtgatctttgaaatgcgttattgattttcttctttcttctgggaaatgcaatgcaggtgaacttgtaagtgttgaatcctccctctcctcactgttcaatcagactgaggcctacttcctttctgataagaaatatggaactgccattgctcagtaggaaaatgtcctttctacaagcattcatatttcaataaaaatctgcactttgtgagttgagccccctcaaagagacctacagaccctgccatgagcatctccatccacactcatcatttcccattttcaccacttctgctcctgtgcaaaccagtactatccttttctgggggatcctaggcagaagcgatggcaggacaaaggcagagaaggcactgccaggtcctgcatgccagtaaaactactcatgtcagctgttctgcaggatcccatgagaagatggcctaattggattatttcagcaagctaagtaatttgaagagagaggctaagccaatgtagtactagagctacactggccttctttggcttaacatttgtctggaattataatttcctcaatctaagaa

SEQ ID NO: 665 - DNA, 1193 bp, Homo sapiens
gaggggtcatagttctccctgagtgagactcacctgctcctctggcccctggtcctgtcctgttctccagcatggtgtgtctgaagctccctggaggctcctgcatggcagctctgacagtgacactgatggtgctgagctccccactggctttggctggggacacccaaccacgtttcttgaagcaggataagtttgagtgtcatttcttcaacgggacggagcgggtgcggtatctgcacagaggcatctataaccaagaggagaacgtgcgcttcgacagcgacgtgggggagtaccgggcggtgacggagctggggcggcctgtcgccgagtcctggaacagccagaaggacttcctggagcggaggcgggccgaggtggacaccgtgtgcagacacaactacggggttggtgagagcttcacagtgcagaggcgagtccatcctgaggtgactgtgtatcctgccaagactcagcccctgcagcaccacaacctcctggtctgctctgtgagtggtttctatccaggcagcattgaagtcaggtggttccggaacggccaggaagagaaggctggggtggtgtccacaggcctgatccagaatggagactggaccttccagaccctggtgatgctggaaacagttcctcggagtggagaagtttacacctgccaagtggagcacccaagtgtgatgagccctctcacagtggaatggagagcacggtctgaatctgcacagagcaagatgctgagtggagtcgggggctttgtgctgggcctgctcttccttggggccgggttgttcatctacttcaggaatcagaaaggacactctggacttcagccaacaggattcctgagctgaagtgaagatgaccacattcaaggaaaaaccttccgccccagctttgcaggatgaaacacttccccgcttggctctcattcttccacaagagagacctttctccggacctggttgctactggttcagcaactctgcagaaaatgtcctcccctgtggctgcctcagctcatgcctttggcctgaagtcccagcattgatggcagcccctcatcttccaagttttgtgctcccctttacctaacgcttcctgcctcccatgcatctgtactcctcctgtgccacaaacacattacattattaaatgtttctcaaacatggagt

SEQ ID NO: 666 - DNA, 1557 bp, Homo sapiens
ctttcactgctctttaagctcccccagcagagtggagaggtctgttttcccttgtttggattcctagaggcagcacaggccaaacacaaggtcatcactaaggaagtgtgcacaggatgaacgcggtgggtgctgtttaagggaagggtaaagcctttaaagggtaaagggctgagagaaggagcagagagtgtgtttggggtggaggcacccaggaggagtccgtgcaggctgcggtgctggacggatcctcctccagctcctgcttagaggtctccagaaccggctggaggcagggagggggtcccaaaagccttgggatcagaaggggttttcccgcctggtcccccagaccccccgttcgcctcaggaagacggaggatgagcctctgggctgcgcgtggtcggggttatggttgggatcagttaaggttccagtgccagcaccccgcccagggagccccggatggtggcgtctctgttagtgtcttccccggaggccgcccctgtgaccggatccttcgtgtccccacagcacgtttcttgaagcaggataagtttgagtgtcatttcttcaacgggacggagcgggtgcggtatctgcacagaggcatctataaccaagaggagaacgtgcgcttcgacagcgacgtgggggagtaccgggcggtgacggagctggggcggcctgtcgccgagtcctggaacagccagaaggacttcctggagcggaggcgggccgaggtggacaccgtgtgcagacacaactacggggttggtgagagcttcacagtgcagaggcgagtccatcctgaggtgactgtgtatcctgccaagactcagcccctgcagcaccacaacctcctggtctgctctgtgagtggtttctatccaggcagcattgaagtcaggtggttccggaacggccaggaagagaaggctggggtggtgtccacaggcctgatccagaatggagactggaccttccagaccctggtgatgctggaaacagttcctcggagtggagaagtttacacctgccaagtggagcacccaagtgtgatgagccctctcacagtggaatggagagcacggtctgaatctgcacagagcaagatgctgagtggagtcgggggctttgtgctgggcctgctcttccttggggccgggttgttcatctacttcaggaatcagaaaggacactctggacttcagccaacaggattcctgagctgaagtgaagatgaccacattcaaggaaaaaccttccgccccagctttgcaggatgaaacacttccccgcttggctctcattcttccacaagagagacctttctccggacctggttgctactggttcagcaactctgcagaaaatgtcctcccctgtggctgcctcagctcatgcctttggcctgaagtcccagcattgatggcagcccctcatcttccaagttttgtgctcccctttacctaacgcttcctgcctcccatgcatctgtactcctcctgtgccacaaacacattacattattaaatgtttctcaaacatggagt

SEQ ID NO: 667 - DNA, 1508 bp, Homo sapiens
atgacacatggcaaactcatcagtgtccgcagctctaaagccagacagtccctcttctctgctcacacaggaagcccaggaagcctctgcctcagagatgctgccgctgctgctgccgctgcccctgctgtgggcagggccctcgctcaggatgcaagattccggctggagatgccagagtccgtgacggtgcaggagggtctgtgcatctttgtgcactgttcggtcttctacctcgagtatggctggaaagattctacccctgcttatggccactggttccgggaaggggtcagtgtagaccaggagactccagtggccacaaacaactcaactcaaaaagtgcagaaggagacccagggccgattccacctcctcggtgatccctcaaggaacaactgctccctgagcatcagagacgccaggaggagggacaacggttcatacttcttttgggtggcgagaggaagaacaaaatttagttacaaatattccccgctctctgtgtatgtgacagccctgacccacaggcccgacatcctcatcccggagttcctaaagtctggccatcccagcaacctgacctgctctgtgccctgggtctgtgagcagggaacaccccccatcttctcctggatgtcagctgcccccacctccctgggccccaggaccctccactcctcagtgctcacgatcatcccacggcctcaggaccacggcaccaacctcatctgtcaggtgacgttccccggagctggtgtgaccacggagagaaccatccagctcagtgtctcctggaaatcaggaaccgtggaagaggtggttgttttggccgtgggggtagtggctgtgaagatcctgcttctctgcctttgcctcatcatcctcagtttccacaagaagaaggcggtgagggcagtggaggttgaggagaatgtatatgctgtcatgggttaatctctcaggcctccagactgtacttccagatgtctcctcatccagttcctccacagtctgaatggccatgtttcttcttcattgctggagaatgaagtgcaaatgccactgcctggactgaaggcctttcacgatctgtcttctgctggactctgctcctgatcccccttctccttgcatcacccgaagtctccctacacccaccaggccaagccctctgtgattctgagactttgcatgtgtagttacttctcctgaaatggccttcctccccattcctgccaatccaggtccttatcatccttcaggttgtcttaaatgtcatccaggtgtgtgtatttttatgtaatccttgtatgatattaagcggagatgtggcatttgttcattaatttgtagacatattcagtaaccatactgaatacatataatgactatgtgccagcatttccgtatgtgcaagaagttcatcaatagatatagactcaaagagctctgtcatcaagctgttgttctgaagagcagaaggatacaaataaaaagaaataagt

SEQ ID NO: 668 - DNA, 1507 bp, Homo sapiens
atgacacatggcaaactcatcagtgtccgcagctctaaagccagacagtccctcttctctgctcacacaggaagcccaggaagcctctgcctcagagatgctgccgctgctgctgccgctgcccctgctgtgggcagggccctcgctcaggatgcaagattccggctggagatgccagagtccgtgacggtgcaggagggtctgtgcatctttgtgcactgttcggtcttctacctcgagtatggctggaaagattctacccctgcttatggccactggttccgggaaggggtcagtgtagaccaggagactccagtggccacaaacaactcaactcaaaaagtgcagaaggagacccagggccgattccacctcctcggtgatccctcaaggaacaactgctccctgagcatcagagacgccaggaggagggacaacggttcatacttcttttgggtggcgagaggaagaacaaaatttagttacaaatattccccgctctctgtgtatgtgacagccctgacccacaggcccgacatcctcatcccggagttcctaaagtctggccatcccagcaacctgacctgctctgtgccctgggtctgtgagcagggaacaccccccatcttctcctggatgtcagctgcccccacctccctgggccccaggaccctccactcctcagtgctcacgatcatcccacggcctcaggaccacggcaccaacctcatctgtcaggtgacgttccccggagctggtgtgaccacggagagaaccatccagctcagtgtctcctggaaatcaggaaccgtggaagaggtggttgttttggccgtgggggtagtggctgtgaagatcctgcttctctgcctttgcctcatcatcctcagtttccacaagaagaaggcggtgagggcagtggaggttgaggagaatgtatatgctgtcatgggttaatctctcaggcctccagactgtacttccagatgtctcctcatccagttcctccacagtctgaatggccatgtttcctcttcattgctggagaatgaagtgcaaatgccactgcctggactgaaggcctttcacgatctgtcttctgctggactctgctcctgatcccccttctccttgcatcacccgaagtctccctacacccaccaggccaagccctctgtgattctgagactttgcatgtgtagttacttctcctgaaatggccttcctccccattcctgccaatccaggtccttatcatccttcaggttgtcttaaatgtcatccaggtgtgtgtatttttatgtaatccttgtatgatattaagcggagatgtggcatttgttcattaatttgtagacatattcagtaaccatactgaatacatataatgactatgtgccagcatttccgtatgtgcagaagttcatcaatagatatagactcaaagagctctgtcatcaagctgttgttctgaagagcagaaggatacaaataaaaagaaataagt

SEQ ID NO: 669 - DNA, 7522 bp, Homo sapiens
cccgggcgagcccgccgtgcgcacagctctgcccgccgcccctggagcggatccccagccgtccctgggcgttctcccgggttctagcaaagccccccggggtgcccatcagtttccttgggtgactacagcgtgtgttttttctttcctctttcccctgcctgtgtgcccttctccaggatggcagaggcggaattgcacaaggaaaggctgcaagccatagcagaaaaaagaaagaggcagactgaaatagaaggcaagcgacaacagcttgacgagcagatacttctgctgcagcattccaagtccaaagtgcttcgggagaaatggctgctgcagggcatacccgctggaactgccgaagaggaggaagccaggaggcggcagtctgaagaggatgagttcagagtcaagcaacttgaagataacattcagaggctggagcaagaaatacaaacgctagaaagtgaagagtcccagatatctgccaaagagcaaatcatcctagagaaactgaaggaaacagaaaaatccttcaaggactttcagaagggtttctccagtacggatggagatgcagtaaattacatttcctcccagcttcccgacctgccaatcctctgttcacgaacagcagaaccatcacctgggcaggacgggaccagcagagcggctggagtcgggtgggagaatgtgctgctaaaggaaggtgagtcagcctcgaacgccacagaaacatccggcccagacatgactatcaagaagcctccccagctttctgaggatgatatctggctaaaaagcgagggagacaactatagtgccaccctcctggagcctgctgccagctctctttccccagatcacaaaaacatggaaattgaggtgtctgttgcagaatgtaaaagtgttcctggaatcacctctaccccacatcccatggaccatccctccgctttctattcacccccgcataatggcctccttactgatcaccacgaatccctggataatgatgttgccagagagatccgctatctagatgaggtgctagaggccaactgctgtgattctgctgtggatggaacgtacaatggaacatcctccccagagcctggtgcagtggttctggtgggcggcctaagcccccctgtccacgaggcgacccagccagaacccactgaaagaacagctagccggcaggcacctcctcacatcgagctcagtaatagcagccctgaccccatggcagaggcagaaagaacaaatggccattcccccagccagcctagagatgcgctgggggacagcctgcaggtgcctgtcagccccagctccacaaccagctcacggtgttcttcccgagatggagagttcactctcaccacactgaaaaaggaggccaagtttgagctgcgtgccttccatgaggacaagaagccctccaagctctttgaggatgacgagcatgagaaagaacaatactgcattagaaaagtgaggccttcagaggagatgctggagctggaaaaggagaggagagagctcatccgcagccaggccgtcaagaagaatcctggcattgcagcaaaatggtggaatcccccgcaggaaaaaaccatcgaggagcagctggacgaggaacatctggagtcgcacaaaaagtacaaggagcgcaaagagagaagggcacagcaggaacagttgctgctgcagaagcagttacagcagcagcagcagcagcccccatcgcagctctgcacagcccctgcctcttctcatgaacgcgcaagcatgattgacaaagcaaaggaggacattgtcacagagcagatagatttctctgctgctcgcaaacaatttcagctgatggagaattccaggcaagcggtggccaagggccagagtacacccaggctgttctccatcaagcctttctacaggcctctggggtcagtcaactcagacaagccactgactaatccgagaccaccttctgtcgggggacctccagaagacagtggtgcctcagccgccaagggacagaaatcccccggtgccctggagaccccatcggcagcaggaagccagggcaacacagcctctcaggggaaggaagggccctacagcgagccttctaaacgtgggcccttatctaaactgtgggctgaggatggagaatttacgagcgcccgggctgtcctcactgtggtcaaggatgatgaccatgggattttggatcagttctcaagatctgtcaatgtctccttgacccaagaggagcttgactctggtctggacgaattgtcggtgaggtctcaggataccacagtcctggagaccctatccaatgatttcagcatggacaacatcagtgacagcggggcatccaatgagacaaccaatgccctccaggaaaattcactggctgatttttctctgccccagacaccacaaactgacaacccctcagagggccgaggagaaggcgtctccaagtcatttagtgatcatggtttctattccccttcctccacgctgggggactctccgttggttgatgaccccttggagtatcaggctggcctcctggtgcagaatgccattcaacaagccatagccgagcaggtggataaagctgtgtccaaaaccagcagggatggagcagagcaacagggacctgaagcgactgtagaggaagctgaagctgcggctttcggctcagaaaagcctcagagcatgtttgagccacctcaggtgtcttctcctgttcaagagaaaagggatgtattaccaaagattctgcctgctgaagacagggcgctcagggaaagggggcccccccagccactgccagctgtgcagcccagtggcccgattaacatggaggagaccaggcccgaaggaagctatttcagcaagtactcggaggcagctgagctgagaagcacagcctccctcctggccactcaagaatctgacgtgatggttgggcctttcaagctgaggtccaggaaacagcggactttgtccatgattgaggaagagatccgagcagctcaggaaagggaagaggagctgaagaggcagagacaagtcttgcagagtacgcagagccccaggacaaagaatgccccatcactgccctccagaacatgctacaaaactgctccagggaaaatagagaaagtcaaacctcctccatcccccaccactgaaggccccagcttgcagcctgacttagcccctgaagaggctgccggaacccagcggcccaagaatctgatgcagaccctcatggaagactatgagacacacaaatctaaaaggcgcgagagaatggatgatagtagttacacttctaagttactgtcttgcaaggtgacttccgaggtcctcgaggccacacgggttaatcgaagaaagagcgcactggctttgcgctgggaagcagggatctatgccaaccaggaggaagaagacaacgaataaacttccttcaacccaggaagcgtctttggtgcttgggagaccaagaaaccaagaaattaacaactgaaagcattttaatggactatttattaaagtgcaaacaaactcagcaatccttatgtagaccagaagctgcaatatacaatgatgaaaatgaaacgaaaaggaagtccccccatcagactctggacacccaggaatcaaaagagaaaggacttttttggtgactcaatcccagtgtctggtttggggccaatctacaatggatccaaaaggacaaaacatgttacaagcaaatcaacatagttgctgcaggcggaactgagaccagcctctctgggcgatgaaggacaatggtggtagggccacttagagagcagtagggcccaggctggtgcagcctacatggcacaggatatttccctgcaccagtttcccacctgtcacttgcagcatcagagggtgttgcattaactccattttctccagcagccataaaatgaatggcgtttctctccatatttgcccagaagaggcagttatgattccacttctcctacatttaattatttttaattgagaacaactcatgatcacaattcataaaatccatattttaagacaatagttcttcatgtcacaaacacaatctattctacatgaggaggctgagaaaggggaagagaaaaacaaaccaaatggatgatgttagctttaggatcgtgtctgcttataatattcactgatctgcagtttatgagaacacattttcacagttatgtttcttcataggaaaactatatttagtgggcaacaactatttttatgatgggatgggggagtatatacacgtatagaatctgtacgcgttgaacaacttggttcaagatggtgggggcatttttagagcggcaataattgaaaaaaaaggcgaactctgccttggagaggtagatgataagaaataaaaaggtgtttataactattttgtattataaagtgggccttagagataggaagaagaatgatggattccttttggatcaatcagaaaggaaacacgaaagaaaagtcaggaaggtagagagagaaaaagggagggaaggagaaagaatgggaataaaataaggaggtaagagatactatttttgctgagcaaccagtgtgtttcaggatgatacaaagaaaaatatagaatagaaataagtgcaggcttggaatcagctacaaatcctaaagatggggtgtgtgtggatgtgtgtgtgtgtgtgtgtacaccattgtgtgtttgtaaaatgtgtatgttcatgagtaagggtgtgtgtgtgtgtgtattaaaattccagagtgaccgtggcacttgggtgtacaggtaattcctccagagctgtttgctggcttcaggagtggagtgagaatttcttttttatgaaaagggatataaaggcaccgagctgatgcagtatttgtaatattaagttgacctaacaaggtatttgcatgagtcacaattacaaagttttgagcggttttgtaatttgacatttaggagagtctcctatttattctcatactttacattcatgcttagtatactatagaggatgccagctttaatctttctgtcatttaaagcaatatgataagggtattcaataattgggtgccctaaatttctggatgagaaaattttcaattctggccatgagaaagaaaaaaaaataaacagccttctttttttttcctttgttttaaaactgtggttttttaaaaaagcaataattaactcagacctcactaaaaatcatttttgtttttatattgttatgtcataagctctattatgttattctaacaagtagcaatttcacaaaatttgtatgtagatgttaacgcacatttcctttgcttcttttattagactagtgttgactttggggggggacatttattcacaaatgagaagtaggcacaaagtaaaaaatggaaccatctactaacaaggatcctttaaaactgccaagggagctctaacttgaagccacatcctacagatggcagcccaaatagcacatgggcaattggcaccatctttatatggttgagtctcctgaatattttgaatgaattctcaacaaaatgtgctagccactggggacgcaaaacaagtaagatccctgttgcaagaaattcattttatagtgagggaggttggcatggagactaaaattctcaggaaaatgagatccgtgttagattagaagtcctgatgtgaaatgggaggactcaggaaggaggatcgtctttacctgaggatttctagccagaggtcccagatgcctgggctgagaacccagcgataagggggcgttcccaaagcagacacagggataagaacagaggaggcagcagcattgcacagccccaggcacagtggcagttaggatggctggagagtaggatagttctatgggttgcccaaaaaatgtgatgcgcttcatgttttctctgactcatggatctggtagagaccatagacatgatatagactaacttccccatttttcacaagaggaaaccatccttatgacttaccttaaagttttttgttctgttttgaaggaaaccatgtgcttcatgaaacctacagttgacaagagaatgtacagctaagagaaaagcttaagaggccacactattcgcggaatggctttagaggcagatgaagtggtctttgaccacagttgattgaaccagagcacttattgcttaaagaataacagagttctagagctgggggttcttgggccatgctccgtgtgtggataaggaaagaaatactgtttctgggactctcccacagtcacaaagctgttttcactgtggcccctacatctcttaacttttgctattactcctatgctgccttccggattactgctgtctatcttcttgctccactcactgaagatcctattataatcccatgaaaatgtaaattacagtttacttgggagagccagattttctctgtgctcttgagttttttattcattcaagaaaccttgggccaccgctttgtacatagcaccgtgctaggctctgggatcccaaatggacccttttaactttctgaagatgggaccgtcccctggaggaaagtcattcctgcctaatccatcgagagaaagaggcttacgaaaaactttgcctctgatgctcagccccacccccaaatagcacacaagcttgttaaccccacctcttacaaaatgtttagattctgtaggtgttaaaagcctttctggaagtattgcattctgccgtgtttataggtgttcactttcctccagagctgattaactactgacatgacttggctttctcatccagaaattatggaaacagggtctgtcagtggcaggaggccgtgctgtgttttacttggatgacacaatgcagtttacttgcctcttcatacccatgcatgctgctcaccctagacaatgacatataagccgtatatagatcaatgtccacatatatatacacacacacatatatatatataaagtgtaacaaggaacactaaaacagtgttgattcttgtctctgaagacaaataattaaaccttttttttcccaactaaagaatggatttaattaaactatgtattgaaaaaaaagtagcctaagtgttagagatggtgaatatattccattttagttaaagaacaaatttcctgaattttaagcattcagtgagctgccaattttgattttgtgttgctctttacccaaattattttttctttgtttttctttttttgggggaggaggggaaaaaagcagcaatactgtgtttggaaattatactctgtatctggttttcctgtgtatgttaaccacttaaatgttattatcctgctttggttttagagtgattgtgaggcattcaatgcaagtatacagttattttctcattaaaatccaatgtgtgttgagtttttataaaaaaaaaaaaaaaaaa

SEQ ID NO: 670 - DNA, 1480 bp, Homo sapiens
agaccctctcctaagagcccccaccaaaatcctctctaggggcaggggatagagcaagacatgtcccccacccagagcaggggctgcggtcagggagctcaggggactcagccactccatggcagagccctgtttaatacaacttgtgtctgggatggcctggatcagagaccctatctaaggagcatgttcagaaaccatgttgctgggatcagacagcagggtccaactgcaggcctgtggtgcaggagctgtgtgaccatggggctgtcaccaggcctctctgtgctgggttcctccagtatagaggagaggcagtatagaggagagggccgcgtcctcacagtgcattctgtgttccagcatccccgaccagccccaaggtcttcccgctgagcctctgcagcacccagccagatgggaacgtggtcatcgcctgcctggtccagggcttcttcccccaggagccactcagtgtgacctggagcgaaagcggacagggcgtgaccgccagaaacttcccacccagccaggatgcctccggggacctgtacaccacgagcagccagctgaccctgccggccacacagtgcctagccggcaagtccgtgacatgccacgtgaagcactacacgaatcccagccaggatgtgactgtgccctgcccagttccctcaactccacctaccccatctccctcaactccacctaccccatctccctcatgctgccacccccgactgtcactgcaccgaccggccctcgaggacctgctcttaggttcagaagcgaacctcacgtgcacactgaccggcctgagagatgcctcaggtgtcaccttcacctggacgccctcaagtgggaagagcgctgttcaaggaccacctgagcgtgacctctgtggctgctacagcgtgtccagtgtcctgccgggctgtgccgagccatggaaccatgggaagaccttcacttgcactgctgcctaccccgagtccaagaccccgctaaccgccaccctctcaaaatccggaaacacattccggcccgaggtccacctgctgccgccgccgtcggaggagctggccctgaacgagctggtgacgctgacgtgcctggcacgtggcttcagccccaaggatgtgctggttcgctggctgcaggggtcacaggagctgccccgcgagaagtacctgacttgggcatcccggcaggagcccagccagggcaccaccaccttcgctgtgaccagcatactgcgcgtggcagccgaggactggaagaagggggacaccttctcctgcatggtgggccacgaggccctgccgctggccttcacacagaagaccatcgaccgcttggcgggtaaacccacccatgtcaatgtgtctgttgtcatggcggaggtggacggcacctgctactgagccgcccgcctgtccccacccctgaataaactccatgctcccccaagcagccccac

SEQ ID NO: 671 - DNA, 1370 bp, Homo sapiens
agaccctctcctaagagcccccaccaaaatcctctctaggggcaggggatagagcaagacatgtcccccacccagagcaggggctgcggtcagggagctcaggggactcagccactccatggcagagccctgtttaatacaacttgtgtctgggatggcctggatcagagaccctatctaaggagcatgttcagaaaccatgttgctgggatcagacagcagggtccaactgcaggcctgtggtgcaggagctgtgtgaccatggggctgtcaccaggcctctctgtgctgggttcctccagtatagaggagaggcagtatagaggagagggccgcgtcctcacagtgcattctgtgttccagcatccccgaccagccccaaggtcttcccgctgagcctctgcagcacccagccagatgggaacgtggtcatcgcctgcctggtccagggcttcttcccccaggagccactcagtgtgacctggagcgaaagcggacagggcgtgaccgccagaaacttcccacccagccaggatgcctccggggacctgtacaccacgagcagccagctgaccctgccggccacacagtgcctagccggcaagtccgtgacatgccacgtgaagcactacacgaatcccagccaggatgtgactgtgccctgcccaggttcagaagcgaacctcacgtgcacactgaccggcctgagagatgcctcaggtgtcaccttcacctggacgccctcaagtgggaagagcgctgttcaaggaccacctgagcgtgacctctgtggctgctacagcgtgtccagtgtcctgccgggctgtgccgagccatggaaccatgggaagaccttcacttgcactgctgcctaccccgagtccaagaccccgctaaccgccaccctctcaaaatccggaaacacattccggcccgaggtccacctgctgccgccgccgtcggaggagctggccctgaacgagctggtgacgctgacgtgcctggcacgtggcttcagccccaaggatgtgctggttcgctggctgcaggggtcacaggagctgccccgcgagaagtacctgacttgggcatcccggcaggagcccagccagggcaccaccaccttcgctgtgaccagcatactgcgcgtggcagccgaggactggaagaagggggacaccttctcctgcatggtgggccacgaggccctgccgctggccttcacacagaagaccatcgaccgcttggcgggtaaacccacccatgtcaatgtgtctgttgtcatggcggaggtggacggcacctgctactgagccgcccgcctgtccccacccctgaataaactccatgctcccccaagcagccccacg

SEQ ID NO: 672 - DNA, 1695 bp, Homo sapiens
agaccctctcctaagagcccccaccaaaatcctctctaggggcaggggatagagcaagacatgtcccccacccagagcaggggctgcggtcagggagctcaggggactcagccactccatggcagagccctgtttaatacaacttgtgtctgggatggcctggatcagagaccctatctaaggagcatgttcagaaaccatgttgctgggatcagacagcagggtccaactgcaggcctgtggtgcaggagctgtgtgaccatggggctgtcaccaggcctctctgtgctgggttcctccagtatagaggagaggcagtatagaggagagggccgcgtcctcacagtgcattctgtgttccagcatccccgaccagccccaaggtcttcccgctgagcctctgcagcacccagccagatgggaacgtggtcatcgcctgcctggtccagggcttcttcccccaggagccactcagtgtgacctggagcgaaagcggacagggcgtgaccgccagaaacttcccacccagccaggatgcctccggggacctgtacaccacgagcagccagctgaccctgccggccacacagtgcctagccggcaagtccgtgacatgccacgtgaagcactacacgaatcccagccaggatgtgactgtgccctgcccaggtcagagggcaggctggggagtggggcggggccaccccgtcgtgccctgacactgcgcctgcacccgtgttccccacagggagccgccccttcactcacaccagagtggaccgcgggccgagccccaggaggtggtggtggacaggccaggaggggcgaggcgggggcatggggaagtatgtgctgaccagctcaggccatctctccactccagttccctcaactccacctaccccatctccctcaactccacctaccccatctccctcatgctgccacccccgactgtcactgcaccgaccggccctcgaggacctgctcttaggttcagaagcgaacctcacgtgcacactgaccggcctgagagatgcctcaggtgtcaccttcacctggacgccctcaagtgggaagagcgctgttcaaggaccacctgagcgtgacctctgtggctgctacagcgtgtccagtgtcctgccgggctgtgccgagccatggaaccatgggaagaccttcacttgcactgctgcctaccccgagtccaagaccccgctaaccgccaccctctcaaaatccggaaacacattccggcccgaggtccacctgctgccgccgccgtcggaggagctggccctgaacgagctggtgacgctgacgtgcctggcacgtggcttcagccccaaggatgtgctggttcgctggctgcaggggtcacaggagctgccccgcgagaagtacctgacttgggcatcccggcaggagcccagccagggcaccaccaccttcgctgtgaccagcatactgcgcgtggcagccgaggactggaagaagggggacaccttctcctgcatggtgggccacgaggccctgccgctggccttcacacagaagaccatcgaccgcttggcgggtaaacccacccatgtcaatgtgtctgttgtcatggcggaggtggacggcacctgctactgagccgcccgcctgtccccacccctgaataaactccatgctcccccaagcagccccacg

SEQ ID NO: 673 - DNA, 1937 bp, Homo sapiens
gatgaagtctcactatgtttcccagcctagtctcaagctcctggactcaagtggtcctcctgcctcagccttccaaagtgcagggattacaggcatgagccaccgcacccagctcaactggttgttattgttatgttggtgtttttgcatggcaatgccatccgcctgacatattgattgtgcaacaatcaatatgttgcacaaaatatctactgagccttgtaacagcttcctaaatccaaggatagatcagaaactatattgtacttcatttaaggcactcatttttgcatttccattgcagatgtctggaaggttatacgatggatacagatacagatacattcacctgtcagaaagatggtcgctggttccctgagagaatctcctgcagtcctaaaaaatgtcctctcccggaaaacataacacatatacttgtacatggggacgatttcagtgtgaataggcaagtttctgtgtcatgtgcagaagggtatacctttgagggagttaacatatcagtatgtcagcttgatggaacctgggagccaccattctccgatgaatcttgcagtccagtttcttgtgggaaacctgaaagtccagaacatggatttgtggttggcagtaaatacacctttgaaagcacaattatttatcagtgtgagcctggctatgaactagaggggaacagggaacgtgtctgccaggagaacagacagtggagtggaggggtggcaatatgcaaagagaccaggtgtgaaactccacttgaatttctcaatgggaaagctgacattgaaaacaggacgactggacccaacgtggtatattcctgcaacagaggctacagtcttgaagggccatctgaggcacactgcacagaaaatggaacctggagccacccagtccctctctgcaaaccaaatccatgccctgttccttttgtgattcccgagaatgctctgctgtctgaaaaggagttttatgttgatcagaatgtgtccatcaaatgtagggaaggttttctgctgcagggccacggcatcattacctgcaaccccgacgagacgtggacacagacaagcgccaaatgtgaaaaaatctcatgtggtccaccagctcacgtagaaaatgcaattgctcgaggcgtacattatcaatatggagacatgatcacctactcatgttacagtggatacatgttggagggtttcctgaggagtgtttgtttagaaaatggaacatggacatcacctcctatttgcagagctgtctgtcgatttccatgtcagaatgggggcatctgccaacgcccaaatgcttgttcctgtccagagggctggatggggcgcctctgtgaagaaccaatctgcattcttccctgtctgaacggaggtcgctgtgtggccccttaccagtgtgactgcccgcctggctggacggggtctcgctgtcatacagctgtttgccagtctccctgcttaaatggtggaaaatgtgtaagaccaaaccgatgtcactgtctttcttcttggacgggacataactgttccaggaaaaggaggactgggttttaaccactgcacgaccatctggctctcccaaaagcaggatcatctctcctcggtagtgcctgggcatcctggaacttatgcaaagaaagtccaacatggtgctgggtcttgtttagtaaacttgttacttggggttactttttttattttgtgatatattttgttattccttgtgacatactttcttacatgtttccatttttaaatatgcctgtattttctatataaaaattatattaaatagatgctgctctaccctcacaaaatgtacatattctgctgtctattgggaaagttcctggtacacatttttattcagttacttaaaatgatttttccattaaagtatattttgctact

SEQ ID NO: 674 - DNA, 1100 bp, Homo sapiens
gtcaccttctcacaatgaggctccttgctcagcttctggggctgctaatgctctgggtccctggatccagtggggatattgtgatgacccagactccactctcctcacctgtcacccttggacagccggcctccatctcctgcaggtctagtgaaagcctcctacacagtaatggaaacacctatttgagttggcttcaccagaggccaggccagcctccaagactcctcatttataaaatttctaaccggttctctggggtcccagacagattcagtggcagtggggcagggacagatttcacactgaaaatcagcagggtggaagctgaggatgtcggggtttattactgcatgcaagtttcacactttcctcgaacgttcggccaagggaccagggtggaaatcaaacgaactgtggctgcaccatctgtcttcatcttcccgccatctgatgagcagttgaaatctggaactgcctctgttgtgtgcctgctgaataacttctatcccagagaggccaaagtacagtggaaggtggataacgccctccaatcgggtaactcccaggagagtgtcacagagcaggacagcaaggacagcacctacagcctcagcagcaccctgacgctgagcaaagcagactacgagaaacacaaagtctacgcctgcgaagtcacccatcagggcctgagctcgcccgtcacaaagagcttcaacaggggagagtgttagagggagaagtgcccccacctgctcctcagttccagcctgaccccctcccatcctttggcctctgaccctttttccacaggggacctacccctattgcggtcctccagctcatctttcacctcacccccctcctcctccttggctttaattatgctaatgttggaggagaatgaataaataaagtgaatctttgcaaaaaaaaaaaaaaaaaaaaaaaaaaaaaaaaaaaaaaaaaaaaaaaaaaaaaaaaaaaaaaaaaaaaaaaaaaaaaaaaaaaaaaaaaaaaaaaaaaaaaaaaaaaaaaaaaaaaaaaaaaaaaaaaaaaaaaaaaaaaaaaaaaaaaaaaaaaaaaaaaaaaaaaaaaaa

SEQ ID NO: 675 - DNA, 1937 bp, Homo sapiens
gatgaagtctcactatgtttcccagcctagtctcaagctcctggactcaagtggtcctcctgcctcagccttccaaagtgcagggattacaggcatgagccaccgcacccagctcaactggttgttattgttatgttggtgtttttgcatggcaatgccatccgcctgacatattgattgtgcaacaatcaatatgttgcacaaaatatctactgagccttgtaacagcttcctaaatccaaggatagatcagaaactatattgtacttcatttaaggcactcatttttgcatttccattgcagatgtctggaaggttatacgatggatacagatacagatacattcacctgtcagaaagatggtcgctggttccctgagagaatctcctgcagtcctaaaaaatgtcctctcccggaaaacataacacatatacttgttcatggggacgatttcagtgtgaataggcaagtttctgtgtcatgtgcagaagggtatacctttgagggagttaacatatcagtatgtcagcttgatggaacctgggagccaccattctccgatgaatcttgcagtccagtttcttgtgggaaacctgaaagtccagaacatggatttgtggttggcagtaaatacacctttgaaagcacaattatttatcagtgtgagcctggctatgaactagaggggaacagggaacgtgtctgccaggagaacagacagtggagtggaggggtggcaatatgcaaagagaccaggtgtgaaactccacttgaatttctcaatgggaaagctgacattgaaaacaggacgactggacccaacgtggtatattcctgcaacagaggctacagtcttgaagggccatctgaggcacactgcacagaaaatggaacctggagccacccagtccctctctgcaaaccaaatccatgccctgttccttttgtgattcccgagaatgctctgctgtctgaaaaggagttttatgttgatcagaatgtgtccatcaaatgtagggaaggttttctgctgcagggccacggcatcattacctgcaaccccgacgagacgtggacacagacaagcgccaaatgtgaaaaaatctcatgtggtccaccagctcacgtagaaaatgcaattgctcgaggcgtacattatcaatatggagacatgatcacctactcatgttacagtggatacatgttggagggtttcctgaggagtgtttgtttagaaaatggaacatggacatcacctcctatttgcagagctgtctgtcgatttccatgtcagaatgggggcatctgccaacgcccaaatgcttgttcctgtccagagggctggatggggcgcctctgtgaagaaccaatctgcattcttccctgtctgaacggaggtcgctgtgtggccccttaccagtgtgactgcccgcctggctggacggggtctcgctgtcatacagctgtttgccagtctccctgcttaaatggtggaaaatgtgtaagaccaaaccgatgtcactgtctttcttcttggacgggacataactgttccaggaaaaggaggactgggttttaaccactgcacgaccatctggctctcccaaaagcaggatcatctctcctcggtagtgcctgggcatcctggaacttatgcaaagaaagtccaacatggtgctgggtcttgtttagtaaacttgttacttggggttactttttttattttgtgatatattttgttattccttgtgacatactttcttacatgtttccatttttaaatatgcctgtattttctatataaaaattatattaaatagatgctgctctaccctcacaaaatgtacatattctgctgtctattgggaaagttcctggtacacatttttattcagttacttaaaatgatttttccattaaagtatattttgctact

SEQ ID NO: 676 - DNA, 1928 bp, Homo sapiens
agggctgcagtcacggggcggcgcggagggccccagcccagtcaggggtgtggccgccgccaccgtaaggctaggccgcgagcttagtcctgggagccgcctccgtcgccgccgtcagagccgccctatcagattatcttaacaagaaaaccaactggaaaaaaaaatgaaattccttatcttcgcatttttcggtggtgttcaccttttatccctgtgctctgggaaagctatatgcaagaatggcatctctaagaggacttttgaagaaataaaagaagaaatagccagctgtggagatgttgctaaagcaatcatcaacctagctgtttatggtaaagcccagaacagatcctatgagcgattggcacttctggttgatactgttggacccagactgagtggctccaagaacctagaaaaagccatccaaattatgtaccaaaacctgcagcaagatgggctggagaaagttcacctggagccagtgagaataccccactgggagaggggagaagaatcagctgtgatgctggagccaagaattcataagatagccatcctgggtcttggcagcagcattgggactcctccagaaggcattacagcagaagttctggtggtgacctctttcgatgaactgcagagaagggcctcagaagcaagagggaagattgttgtttataaccaaccttacatcaactactcaaggacggtgcaataccgaacgcagggggcggtggaagctgccaaggttggggctttggcatctctcattcgatccgtggcctccttctccatctacagtcctcacacaggtattcaggaataccaggatggcgtgcccaagattccaacagcctgtattacggtggaagatgcagaaatgatgtcaagaatggcttctcatgggatcaaaattgtcattcagctaaagatgggggcaaagacctacccagatactgattccttcaacactgtagcagagatcactgggagcaaatatccagaacaggttgtactggtcagtggacatctggacagctgggatgttgggcagggtgccatggatgatggcggtggagcctttatatcatgggaagcactctcacttattaaagatcttgggctgcgtccaaagaggactctgcggctggtgctctggactgcagaagaacaaggtggagttggtgccttccagtattatcagttacacaaggtaaatatttccaactacagtctggtgatggagtctgacgcaggaaccttcttacccactgggctgcaattcactggcagtgaaaaggccagggccatcatggaggaggttatgagcctgctgcagcccctcaatatcactcaggtcctgagccatggagaagggacagacatcaacttttggatccaagctggagtgcctggagccagtctacttgatgacttatacaagtatttcttcttccatcactcccacggagacaccatgactgtcatggatccaaagcagatgaatgttgctgctgctgtttgggctgttgtttcttatgttgttgcagacatggaagaaatgctgcctaggtcctagaaacagtaagaaagaaacgttttcatgcttctggccaggaatcctgggtctgcaactttggaaaactcctcttcacataacaatttcatccaattcatcttcaaagcacaactctatttcatgctttctgttattatctttcttgatactttccaaattctctgattctagaaaaaggaatcattctcccctccctcccaccacatagaatcaacatatggtagggattacagtgggggcatttctttatatcacctcttaaaaacattgtttccactttaaaagtaaacacttaataaatttttggaagaacaaaaaaaaaaaaaaaaaaaaaaaaaaaaaa

SEQ ID NO: 677 - DNA, 5746 bp, Homo sapiens
gctgtcgaagtccacgtgtctgggaagagcatgaagttaaatgtgtgagctctgagtgggtggacagagagaagacagggtgaagatcacctcctcagggtggccacttgatactccacagagcctccccaaggtgggcccagaggctgccttcctcaagctcctggaaggagcctgaccttgggaaacacctttgaactgaatgaatgacttgcctaaagcctggtctttgaagattgaagggggttccccttcaaaggccttgcctatgttcctccactattctcatgtcatctctggctgttgccataaccaatctcctttcccatgagcaggcgttcctgttttaaatcctgccttggtccctcacctggcacaaggacaagtgctactggtgtcagacccatcgcccaacactgatcctgctaagtactctgaaagcacctccgcgacccgacaccagatgaagggggaagatgcccagccacaggagatggcgtccacaagcttcccaagggccagtggtcccagtcctgaattcagacagcacggggactctgacgggaagagagggagcccacagaatctgcccatagaacatcattttgcttgtaaagagtgtggggacacctttcggcttaaagtcctgcttgtccagcaccagagagtccacagtgaggagaagggctgggaatgtggcgactgcgggaaggtctttaggggggtggcggagtttaatgagcacaggaaaagccacgtagctgcggagccccagcccggccccagtagggccctggagaatgccgcggagaagagggagcagatggagagggaggcaaagcccttcgagtgcgaggagtgcggaaaacggtttaagaagaatgcaggcctgagtcagcatctgagggtccacagcagagagaagccctttgattgcgaggaatgcgggcggtcgttcaaagtcaacacccacctcttccgacatcagaaacttcacacttcggaaaagcctttcgcctgcaaggcgtgcagcagggatttcctggatcgccaggagcttctcaagcaccagcgcatgcacactggccacctgcccttcgactgcgacgactgcggcaagtccttccgaggggtcaacgggctggccgagcaccagcgcatccacagtggggccaagccatacgggtgtccccactgcggcaagctcttccgaaggagctcggagctcaccaagcaccggcggatccacacgggcgagaagccctacgcctgcggccagtgcggcaaggccttccgccagagctccagcctcctggagcacgcacgcatccacagtggcgagcggccctacgcatgcggcgagtgtggcaaggccttccgtgggccctctgacctcatcaagcaccggcgcatccacagcggactgaaaccctatgagtgcgacaaatgcggcaaggccttccgccggagctccggcctcagtcgccaccggcggatccacagtggggcgcggcgctgcgaatgcagccagtgtggccgcgtgttcaagaggcgctcggcactgcagaagcatcagccaacccaccacgagtagaaacgccctgtggtcccgcgggacagggacggagtccccagaggggatggcagagtcaaaggagatgaacagttttgtagcgcttatatattttgtcttccaaaaggttgagaccgatttatactgccaccagcaatttataagtgttacgttatgcccatcaagagtagcttgtaccatttaacttagtttggctagtttaactggtaggaagtaccatcaaggtatttcagtccacatgccttgaatccaagaatgagagaggacaaatctggatgtggggtagggaggggcttagaggtcatcaactccaagctccccccgccccagagaaacacacagagctgttccacgatggcgtcctcataatgtgatcccagctttcctgaagagaacgttgccctcatgatttttggcctacttgaatttataaatttttagggatgtaaatagaacactcaaatgtcttaaaatatttaatttattaatttagttatacatacatactgtaaatcacatattatataaaataatatattaatttagaaaataccccatttttgccaccctccctttcacgaaatcattttactctgactcctcaccgtcttcaccaacatgggaaccctgtttgagtcatcagacagtttcaagacacacccagtcacttccatccgagctctgcacggtcgctcagtgacgatcccttcatgaggctctcattagaaattttctcccaagccataagaccatatttgcagaacattaggacgatttctcttgtcgttttttaatctgtcctgtgactgtacaatataaccacttaaggtcatactttttcaaacaacctttaaacgtcttttcttttaaagcacccaaaatgtcattgtgaggccaaacgcctagtaacagttactgaatctgggttaaatgtcggtatctttttttcttaaaccatttcaatttggtgtcccctatacatatccaaaactagcatcgattggggttgttttgaactaatgggtcttgtcctcaagcagcactattttgttcaaaataaaatagttgagagcatgcccctaagaagagatacatctcaaggactcaagtgcagggtgacgcctccttttggaaatgagcctctcctggtatcaggcctagatggtacttctccagccttccgtttcttgttctataaaacaggggtgatcacagcacctacctccgaaggttatcacgaggactgccatcgtggctgcagagtgccaggaccaccggcctggtatggaggtacacactcagtgaaggccatctgctgtcattgtcattgtcatagttattgccgtcattctgtggcttgtcaattccagaactggggatagaccccaggcctcctgaccaccagtctcatctttctcttatgcgatgacttaaatggtgtttctgttttttgcatgcaaatggtccgttcatctcctttgactagttatcaacttaccttcggatatattaactttatgtagcagttctttctatattgatggtgatgttctcttttccaattttattgctttgctttttgtagcagttttattacgtttttgttgtgaaagcttttaatttttacatatccaagcattcattttttgtccactcagtcataactttcattgcttctgtagctagatatgatgacattttctctagaattttaattacaaacaaaaagctgcaaccccagcccatcagaaggtgagtacaccaggtgggcaggctggatggaaatgggccagagaagcaggctctttcctcatccgagatgcggactccctgtctatctgtgggcaccacttgactatccaacctgaccactgcggcacactggagatgctcccatcatagattagccagaactctgtgactgctcatcattatagaccccgccagcagcagtggggcttggcctcacctagatcaatggagtggtccaaacttggtctgggagcaagcagcccagccatcctttgagctcctgggagccttggcaatgctccgagtggattcagtgactgagcagcagattcacccaagaaacatctccttggacacaagaagacttgcctagaccacatcctcctttcagccggtgactctagaactagaaagagattggttcataggcttctgctgtgggcagctaggggaaaattcacccatgtgttctggcatcacttcctatagccacacctaagtgagggcaacagagcagaggctcggagaggaaccctgcccctccgatggcttgtgcgttatgctgatagaagctggcagcactgccctgggctatgatttgcaacagccatgcccaggaggagcactaaagcaaaggtttggagggcagtggaacccttctgaaagcctgtgtggcatagaagtagaagctggtcctcctgggtctgagctaccatttccagtgggctcccccaagaggaacagcagcaagggctagcgaggaacctgcccctccagtggcccacagaagccacagatagaagccagccccaccagggctgtgctgtgacttcccagcagctgtggctggggacagggacactaggagggcctggcaaggaagtgtgcccttctcgtgggcccaccaaggctgaggcagagcttcctagcagacacaacttggaagggcttctcaggcacccatcctgacccccaggctggagaggagccaaaagcacttgttacatagtgattccttttgccctgtgggcctcagttcttgcagtagttgtgaatctgtgtctgaaatcactactttcttctcggatcctttttctcttttcgagttgttaggatgtgttttgtacagctgtcatttgataaagaaggttgacctctaccaggggcaagtctggcacctttacctagaagtactctgccatgtcttgcccgttcatttatcgtttgttgggtttcatgagggatcccattgaagtagatcccttttatgaagggatcccattgaatgcagcattaactcagaacgtagcataaagtcgtcactgctcccagctgggacgtggtgtcttggcatcccttcctgccgtccttgactctttcccatcttcagttctataattttctcccaaacaaatgctcttttagagttaacactaaagatctggtctttgccgtcaaggttgacagaacagctgttcatggtgtttgcggtgaaacccgtgttctctttcaatgcagtctgtggctttaacgtgtgtcctgtaatttcgccaagatcatttcttgcctctggtaacttgggggtggatttccttgggctctctaggtgtactgctatgtcagatgcaaaatgtcacccagcttcctgtcacatatccttgtctgtgcattcatgcatctacctcattccggttttctttctaatctcatgtattcctgttgtgaggaaatgtgttcttttcccgatccttttgtagttcatacacatgacaattgggtttccacgcacgtgcatgagatgttcctccttcaaaccttgttactatgtcagcacattaactgcctggcatggaaaaagaaaaaaaaaaaagaaatatgttcttttcctaccatttgaaaaaaatcctccattgcttttattagagttttgaatacttgtgaaaattttcaaaagaaagtaattgattaccatttttgctgcttattacgatgagctgtgtccattagctgtgtcaccccactcttgcatttccagaatagtccctacccaattgcagcgggcatgtttttgagtggtgttgcattccatgtgcttgattttgtcctagaactggcacagcgcctgccctacctgcagccctgggttgtggccctgttgcgtaccatgtgatttgccaccccgcttctaggccatattaattcagccagaactgaacacctgacccaagggcagcaagcaatcatcagagcatagagctgacagaacatgatggaccacggacaccaccaggccttccagatctgaaatgcaaacaaggaaacagaagcttctaggcatcagaaggcctggccatggtatgttcttggatttctggcagcagccctcattggtccacgtgc

SEQ ID NO: 678 - DNA, 5746 bp, Homo sapiens
gctgtcgaagtccacgtgtctgggaagagcatgaagttaaatgtgtgagctctgagtgggtggacagagagaagacagggtgaagatcacctccccagggtggccacttgatactccacagagcctccccaaggtgggcccagaggctgccttcctcaagctcctggaaggagcctgaccttgggaaacacctttgaactgaatgaatgacttgcctaaagcctggtctttgaagattgaagggggttccccttcaaaggccttgcctatgttcctccactattctcatgtcatctctggctgtcgccataaccaatctcctttcccatgagcaggcgttcccgttttaaatcctgccttggtccctcacctggcacaaggacaagtgctactggtgtcagacccatcgcccaacactgatcctgctaagtactctgaaagcacctccgcgacccgacaccagatgaagggggaagatgcccagccacaggagatggcgtccacaagcttcccaagggccagtggtcccagtcctgaattcagacagcacggggactctgacgggaagagagggagcccacagaatctgcccatagaacatcattttgcttgtaaagagtgtggggacacctttcggcttaaagtcctgcttgtccagcaccagagagtccacagtgaggagaagggctgggaatgtggcgactgcgggaaggtctttaggggggtggcggagtttaatgagcacaggaaaagccacgtagctgcggagccccagcccggccccagtagggccctggagaatgccgcggagaagagggagcagatggagagggaggcaaagcccttcgagtgcgaggagtgcggaaaacggtttaagaagaatgcaggcctgagtcagcatctgagggtccacagcagagagaagccctttgattgcgaggaatgcgggcggtcgttcaaagtcaacacccacctcttccgacatcagaaacttcacacttcggaaaagcctttcgcctgcaaggcgtgcagcagggatttcctggatcgccaggagcttctcaagcaccagcgcatgcacactggccacctgcccttcgactgcgacgactgcggcaagtccttccgaggggtcaacgggctggccgagcaccagcgcatccacagtggggccaagccatacgggtgtccccactgcggcaagctcttccgaaggagctcggagctcaccaagcaccggcggatccacacgggcgagaagccctacgcctgtggccagtgcggcaaggccttccgccagagctccagcctcctggagcacgcacgcatccacagtggcgagcggccctacgcatgcggcgagtgtggcaaggccttccgtgggccctctgacctcatcaagcaccggcgcatccacagcggactgaaaccctatgagtgcgacaaatgcggcaaggccttccgccggagctccggcctcagtcgccaccggcggatccacagtggggcgcggcgctgcgaatgcagccagtgtggccgcgtgttcaagaggcgctcggcactgcagaagcatcagccaacccaccacgagtagaaacgccctgtggtcccgcgggacagggacggagtccccagaggggatggcagagtcaaaggagatgaacagttttgtagcgcttatatattttgtcttccaaaaggttgagaccgatttatactgccaccagcaatttataagtgttacgttatgcccatcaagagtagcttgtaccatttaacttagtttggctagtttaactggtaggaagtaccatcaaggtatttcagtccacatgccttgaatccaagaatgagagaggacagatctggatgtggggtagggaggggcttagaggtcatcaactccaagctccccccgccccagagaaacacacagagctgttccacgatggcgtcctcataatgtgatcccagctttcctgaagagaacgttgccctcatgatttttggcctacttgaatttataaatttttagggatgtaaatagaacactcaaatgtcttaaaatatttaatttattaatttagttatacatacatactgtaaatcacatattatataaaataatatattaatttagaaaataccccatttttgccaccctccctttcacgaaatcattttactctgactcctcaccgtcttcaccaacatgggaaccctgtttgagtcatcagacagtttcaagacacacccagtcacttccatccgagctctgcacggtcgctcagtgacgatcccttcatgaggctctcattagaaattttctcccaagccataagaccatatttgcagaacattaggacgatttctcttgtcgttttttaatctgtcctgtgactgtacaatataaccacttaaggtcatactttttcaaacaacctttaaacgtcttttcttttaaagcacccaaaatgtcattgtgaggccaaacgcctagtaacagttactgaatctgggttaaatgtcggtatctttttttcttaaaccatttcaatttggtgtcccctatacatatccaaaactagcatcgattggggttgttttgaactaatgggtcttgtcctcaagcagcactattttgttcaaaataaaatagttgagagcatgcccctaagaagagatacatctcaaggactcaagtgcagggtgacgcctccttttggaaatgagcctctcctggtatcaggcctagatggtacttctccagccttccgtttcttgttctataaaacaggggtgatcacagcacctacctccgaaggttatcacgaggactgccatcgtggctgcagagtgccaggaccaccggcctggtatggaggtacacactcagtgaaggccatctgctgtcattgtcattgtcatagttattgccgtcattctgtggcttgtcaattccagaactggggatagaccccaggcctcctgaccaccagtctcatctttctcttatgcgatgacttaaatggtgtttctgttttttgcatgcaaatggtccgttcatctcctttgactagttatcaacttaccttcggatatattaactttatgtagcagttctttctatattgatggtgatgttctcttttccaattttattgctttgctttttgtagcagttttattacgtttttgttgtgaaagcttttaatttttacatatccaagcattcattttttgtccactcagtcataactttcattgcttctgtagctagatatgatgacattttctctagaattttaattacaaacaaaaagctgcaaccccagcccatcagaaggtgagtacaccaggtgggcaggctggatggaaatgggccagagaagcaggctctttcctcatccgagatgcggactccctgtctatctgtgggcaccacttgactatccaacctgaccactgcggcacactggagatgctcccatcatagattagccagaactctgtgactgctcatcattatagaccccgccagcagcagtggggcttggcctcacctagatcaatggagtggtccaaacttggtctgggagcaagcagcccagccatcctttgagctcctgggagccttggcaatgctccgagtggattcagtgactgagcagcagattcacccaagaaacatctccttggacacaagaagacttgcctagaccacatcctcctttcagccggtgactctagaactagaaagagattggttcataggcttctgctgtgggcagctaggggaaaattcacccatgtgttctggcatcacttcctatagccacacctaagtgagggcaacagagcagaggctcggagaggaaccctgcccctccgatggcttgtgcgttatgctgatagaagctggcagcactgccctgggctatgatttgcaacagccatgcccaggaggagcactaaagcaaaggtttggagggcagtggaacccttctgaaagcctgtgtggcatagaagtagaagctggtcctcctgggtctgagctaccatttccagtgggctcccccaagaggaacagcagcaagggctagcgaggaacctgcccctccagtggcccacagaagccacagatagaagccagccccaccagggctgtgctgtgacttcccagcagctgtggctggggacagggacactaggagggcctggcaaggaagtgtgcccttctcgtgggcccaccaaggctgaggcagagcttcctagcagacacaacttggaagggcttctcaggcacccatcctgacccccaggctggagaggagccaaaagcacttgttacatagtgattccttttgccctgtgggcctcagttcttgcagtagttgtgaatctgtgtctgaaatcactactttcttctcggatcctttttctcttttcgagttgttaggatgtgttttgtacagctgtcatttgataaagaaggttgacctctaccaggggcaagtctggcacctttacctagaagtactctgccatgtcttgcccgttcatttatcgtttgttgggtttcatgagggatcccattgaagtagatcccttttatgaagggatcccattgaatgcagcattaactcagaacgtagcataaagtcgtcactgctcccagctgggacgtggtgtcttggcatcccttcctgccgtccttgactctttcccatcttcagttctataattttctcccaaacaaatgctcttttagagttaacactaaagatctggtctttgccgtcaaggttgacagaacagctgttcatggtgtttgcggtgaaacccgtgttctctttcaatgcagtctgtggctttaacgtgtgtcctgtaatttcgccaagttcatttcttgcctctggtaacttgggggtggatttccttgggctctctaggtgtactgctatgtcagatgcaaaatgtcacccagcttcctgtcacatatccttgtctgtgcattcatgcatctacctcattccggttttctttctaatctcatgtattcctgttgtgaggaaatgtgttcttttcccgatccttttgtagttcatacacgtgacaattgggtttccacgcacgtgcatgagatgttcctccttcaaaccttgttactatgtcagcacattaactgcctggcatggaaaaagaaaaaaaaaaaagaaatatgttcttttcctaccatttgaaaaaaatcctccattgcttttattagagttttgaatacttgtgaaaattttcaaaagaaagtaattgattaccatttttgctgcttattacgatgagctgtgtccattagctgtgtcaccccactcttgcatttccagaatagtccctacccaattgcagcgggcatgtttttgagtggtgttgcattccatgtgcttgattttgtcctagaactggcacagcgcctgccctacctgcagccctgggttgtggccctgttgcgtaccatgtgatttgccaccccgcttctaggccatattaattcagccagaactgaacacctgacccaagggcagcaagcaatcatcagagcatagagctgacagaacatgatggaccacggacaccaccaggccttccagatctgaaatgcaaacaaggaaacagaagcttctaggcatcagaaggcctggccatggtatgttcttggatttctggcagcagccctcattggtccacgtgc

SEQ ID NO: 679 - DNA, 6243 bp, Homo sapiens
gctgtcgaagtccacgtgtctgggaagagcatgaagttaaatgtgtgagctctgagtgggtggacagagagaagacagggtgaagatcacctcctcagggtggccacttgatactccacagagcctccccaaggtgggcccagaggctgccttcctcaagctcctggaaggagcctgaccttgggaaacacctttgaactgaatgaatgacttgcctaaagcctggtctttgaagattgaagggggttccccttcaaaggccttgcctatgttcctccactattctcatgtcatctctggctgttgccataaccaatctcctttcccatgagcaggcgttcctgttttaaatcctgccttggtccctcacctggcacaaggacaagtgctactggtgtcagacccatcgcccaacactgatcctgctaagtactctgaaagcacctccgcgacccgacaccagatgaagggggaagatgcccagccacaggagatggcgtccacaagcttcccaagggccagtggtcccagtcctgaattcagacagcacggggactctgacgggaagagagggagcccacagaatctgcccatagaacatcattttgcttgtaaagagtgtggggacacctttcggcttaaagtcctgcttgtccagcaccagagagtccacagtgaggagaagggctgggaatgtggcgactgcgggaaggtctttaggggggtggcggagtttaatgagcacaggaaaagccacgtagctgcggagccccagcccggccccagtagggccctggagaatgccgcggagaagagggagcagatggagagggaggcaaagcccttcgagtgcgaggagtgcggaaaacggtttaagaagaatgcaggcctgagtcagcatctgagggtccacagcagagagaagccctttgattgcgaggaatgcgggcggtcgttcaaagtcaacacccacctcttccgacatcagaaacttcacacttcggaaaagcctttcgcctgcaaggcgtgcagcagggatttcctggatcgccaggagcttctcaagcaccagcgcatgcacactggccacctgcccttcgactgcgacgactgcggcaagtccttccgaggggtcaacgggctggccgagcaccagcgcatccacagtggggccaagccatacgggtgtccccactgcggcaagctcttccgaaggagctcggagctcaccaagcaccggcggatccacacgggcgagaagccctacgcctgcggccagtgcggcaaggccttccgccagagctccagcctcctggagcacgcacgcatccacagtggcgagcggccctacgcatgcggcgagtgtggcaaggccttccgtgggccctctgacctcatcaagcaccggcgcatccacagcggactgaaaccctatgagtgcgacaaatgcggcaaggccttccgccggagctccggcctcagtcgccaccggcggatccacagtggggcgcggcgctgcgaatgcagccagtgtggccgcgtgttcaagaggcgctcggcactgcagaagcatcagccaacccaccacgagtagaaacgccctgtggtcccgcgggacagggacggagtccccagaggggatggcagagtcaaaggagatgaacagttttgtagcgcttatatattttgtcttccaaaaggttgagaccgatttatactgccaccagcaatttataagtgttacgttatgcccatcaagagtagcttgtaccatttaacttagtttggctagtttaactggtaggaagtaccatcaaggtatttcagtccacatgccttgaatccaagaatgagagaggacaaatctggatgtggggtagggaggggcttagaggtcatcaactccaagctccccccgccccagagaaacacacagagctgttccacgatggcgtcctcataatgtgatcccagctttcctgaagagaacgttgccctcatgatttttggcctacttgaatttataaatttttagggatgtaaatagaacactcaaatgtcttaaaatatttaatttattaatttagttatacatacatactgtaaatcacatattatataaaataatatattaatttagaaaataccccatttttgccaccctccctttcacgaaatcattttactctgactcctcaccgtcttcaccaacatgggaaccctgtttgagtcatcagacagtttcaagacacacccagtcacttccatccgagctctgcacggtcgctcagtgacgatcccttcatgaggctctcattagaaattttctcccaagccataagaccatatttgcagaacattaggacgatttctcttgtcgttttttaatctgtcctgtgactgtacaatataaccacttaaggtcatactttttcaaacaacctttaaacgtcttttcttttaaagcacccaaaatgtcattgtgaggccaaacgcctagtaacagttactgaatctgggttaaatgtcggtatctttttttcttaaaccatttcaatttggtgtcccctatacatatccaaaactagcatcgattggggttgttttgaactaatgggtcttgtcctcaagcagcactattttgttcaaaataaaatagttgagagcatgcccctaagaagagatacatctcaaggactcaagtgcagggtgacgcctccttttggaaatgagcctctcctggtatcaggcctagatggtacttctccagccttccgtttcttgttctataaaacaggggtgatcacagcacctacctccgaaggttatcacgaggactgccatcgtggctgcagagtgccaggaccaccggcctggtatggaggtacacactcagtgaaggccatctgctgtcattgtcattgtcatagttattgccgtcattctgtggcttgtcaattccagaactggggatagaccccaggcctcctgaccaccagtctcatctttctcttatgcgatgacttaaatggtgtttctgttttttgcatgcaaatggtccgttcatctcctttgactagttatcaacttaccttcggatatattaactttatgtagcagttctttctatattgatggtgatgttctcttttccaattttattgctttgctttttgtagcagttttattacgtttttgttgtgaaagcttttaatttttacatatccaagcattcattttttgtccactcagtcataactttcattgcttctgtagctagatatgatgacattttctctagaattttaattacaaacaaaaagctgcaaccccagcccatcagaaggtgagtacaccaggtgggcaggctggatggaaatgggccagagaagcaggctctttcctcatccgagatgcggactccctgtctatctgtgggcaccacttgactatccaacctgaccactgcggcacactggagatgctcccatcatagattagccagaactctgtgactgctcatcattatagaccccgccagcagcagtggggcttggcctcacctagatcaatggagtggtccaaacttggtctgggagcaagcagcccagccatcctttgagctcctgggagccttggcaatgctccgagtggattcagtgactgagcagcagattcacccaagaaacatctccttggacacaagaagacttgcctagaccacatcctcctttcagccggtgactctagaactagaaagagattggttcataggcttctgctgtgggcagctaggggaaaattcacccatgtgttctggcatcacttcctatagccacacctaagtgagggcaacagagcagaggctcggagaggaaccctgcccctccgatggcttgtgcgttatgctgatagaagctggcagcactgccctgggctatgatttgcaacagccatgcccaggaggagcactaaagcaaaggtttggagggcagtggaacccttctgaaagcctgtgtggcatagaagtagaagctggtcctcctgggtctgagctaccatttccagtgggctcccccaagaggaacagcagcaagggctagcgaggaacctgcccctccagtggcccacagaagccacagatagaagccagccccaccagggctgtgctgtgacttcccagcagctgtggctggggacagggacactaggagggcctggcaaggaagtgtgcccttctcgtgggcccaccaaggctgaggcagagcttcctagcagacacaacttggaagggcttctcaggcacccatcctgacccccaggctggagaggagccaaaagcacttgttacatagtgattccttttgccctgtgggcctcagttcttgcagtagttgtgaatctgtgtctgaaatcactactttcttctcggatcctttttctcttttcgagttgttaggatgtgttttgtacagctgtcatttgataaagaaggttgacctctaccaggggcaagtctggcacctttacctagaagtactctgccatgtcttgcccgttcatttatcgtttgttgggtttcatgagggatcccattgaagtagatcccttttatgaagggatcccattgaatgcagcattaactcagaacgtagcataaagtcgtcactgctcccagctgggacgtggtgtcttggcatcccttcctgccgtccttgactctttcccatcttcagttctataattttctcccaaacaaatgctcttttagagttaacactaaagatctggtctttgccgtcaaggttgacagaacagctgttcatggtgtttgcggtgaaacccgtgttctctttcaatgcagtctgtggctttaacgtgtgtcctgtaatttcgccaagatcatttcttgcctctggtaacttgggggtggatttccttgggctctctaggtgtactgctatgtcagatgcaaaatgtcacccagcttcctgtcacatatccttgtctgtgcattcatgcatctacctcattccggttttctttctaatctcatgtattcctgttgtgaggaaatgtgttcttttcccgatccttttgtagttcatacacatgacaattgggtttccacgcacgtgcatgagatgttcctccttcaaaccttgttactatgtcagcacattaactgcctggcatggaaaaagaaaaaaaaaaaagaaatatgttcttttcctaccatttgaaaaaaatcctccattgcttttattagagttttgaatacttgtgaaaattttcaaaagaaagtaattgattaccatttttgctgcttattacgatgagctgtgtccattagctgtgtcaccccactcttgcatttccagaatagtccctacccaattgcagcgggcatgtttttgagtggtgttgcattccatgtgcttgattttgtcctagaactggcacagcgcctgccctacctgcagccctgggttgtggccctgttgcgtaccatgtgatttgccaccccgcttctaggccatattaattcagccagaactgaacacctgacccaagggcagcaagcaatcatcagagcatagagctgacagaacatgatggaccacggacaccaccaggccttccagatctgaaatgcaaacaaggaaacagaagcttctaggcatcagaaggtgtggggagcagcacagtactcagaggagtgaggagcgtggcgcctgctgggaggaaggcctggccatgatgagtggccaactctggagcccaggatgttgcttcccagtctggtggtgaatcctccacaatctgagctggccctctggtgcccaaagcagactcctggggtccctgtattgggcacttacccacttcctgctggccgcagcatgacacctgatgctcctagagcagccaactgaattccagaagaaaggcttcagtggtgtgttttccagaaggaacctggctcctaggattaacagttgggtcaaatctcaaaaactctttgcccttaactactgaaaacttccagcatctatagcagtcatagtcacaagatttcctttaaatttttcagcaattgttttcctaaggcattctgtaaagtctggcttgaagtttgtttagttgagataaaaatgtgtttgactgcactccagcctgagagacagagtgacatactgtctcaaaaataaataaacaaataagttttttaaaacatgtttg

SEQ ID NO: 680 - DNA, 6243 bp, Homo sapiens
gctgtcgaagtccacgtgtctgggaagagcatgaagttaaatgtgtgagctctgagtgggtggacagagagaagacagggtgaagatcacctccccagggtggccacttgatactccacagagcctccccaaggtgggcccagaggctgccttcctcaagctcctggaaggagcctgaccttgggaaacacctttgaactgaatgaatgacttgcctaaagcctggtctttgaagattgaagggggttccccttcaaaggccttgcctatgttcctccactattctcatgtcatctctggctgtcgccataaccaatctcctttcccatgagcaggcgttcccgttttaaatcctgccttggtccctcacctggcacaaggacaagtgctactggtgtcagacccatcgcccaacactgatcctgctaagtactctgaaagcacctccgcgacccgacaccagatgaagggggaagatgcccagccacaggagatggcgtccacaagcttcccaagggccagtggtcccagtcctgaattcagacagcacggggactctgacgggaagagagggagcccacagaatctgcccatagaacatcattttgcttgtaaagagtgtggggacacctttcggcttaaagtcctgcttgtccagcaccagagagtccacagtgaggagaagggctgggaatgtggcgactgcgggaaggtctttaggggggtggcggagtttaatgagcacaggaaaagccacgtagctgcggagccccagcccggccccagtagggccctggagaatgccgcggagaagagggagcagatggagagggaggcaaagcccttcgagtgcgaggagtgcggaaaacggtttaagaagaatgcaggcctgagtcagcatctgagggtccacagcagagagaagccctttgattgcgaggaatgcgggcggtcgttcaaagtcaacacccacctcttccgacatcagaaacttcacacttcggaaaagcctttcgcctgcaaggcgtgcagcagggatttcctggatcgccaggagcttctcaagcaccagcgcatgcacactggccacctgcccttcgactgcgacgactgcggcaagtccttccgaggggtcaacgggctggccgagcaccagcgcatccacagtggggccaagccatacgggtgtccccactgcggcaagctcttccgaaggagctcggagctcaccaagcaccggcggatccacacgggcgagaagccctacgcctgtggccagtgcggcaaggccttccgccagagctccagcctcctggagcacgcacgcatccacagtggcgagcggccctacgcatgcggcgagtgtggcaaggccttccgtgggccctctgacctcatcaagcaccggcgcatccacagcggactgaaaccctatgagtgcgacaaatgcggcaaggccttccgccggagctccggcctcagtcgccaccggcggatccacagtggggcgcggcgctgcgaatgcagccagtgtggccgcgtgttcaagaggcgctcggcactgcagaagcatcagccaacccaccacgagtagaaacgccctgtggtcccgcgggacagggacggagtccccagaggggatggcagagtcaaaggagatgaacagttttgtagcgcttatatattttgtcttccaaaaggttgagaccgatttatactgccaccagcaatttataagtgttacgttatgcccatcaagagtagcttgtaccatttaacttagtttggctagtttaactggtaggaagtaccatcaaggtatttcagtccacatgccttgaatccaagaatgagagaggacagatctggatgtggggtagggaggggcttagaggtcatcaactccaagctccccccgccccagagaaacacacagagctgttccacgatggcgtcctcataatgtgatcccagctttcctgaagagaacgttgccctcatgatttttggcctacttgaatttataaatttttagggatgtaaatagaacactcaaatgtcttaaaatatttaatttattaatttagttatacatacatactgtaaatcacatattatataaaataatatattaatttagaaaataccccatttttgccaccctccctttcacgaaatcattttactctgactcctcaccgtcttcaccaacatgggaaccctgtttgagtcatcagacagtttcaagacacacccagtcacttccatccgagctctgcacggtcgctcagtgacgatcccttcatgaggctctcattagaaattttctcccaagccataagaccatatttgcagaacattaggacgatttctcttgtcgttttttaatctgtcctgtgactgtacaatataaccacttaaggtcatactttttcaaacaacctttaaacgtcttttcttttaaagcacccaaaatgtcattgtgaggccaaacgcctagtaacagttactgaatctgggttaaatgtcggtatctttttttcttaaaccatttcaatttggtgtcccctatacatatccaaaactagcatcgattggggttgttttgaactaatgggtcttgtcctcaagcagcactattttgttcaaaataaaatagttgagagcatgcccctaagaagagatacatctcaaggactcaagtgcagggtgacgcctccttttggaaatgagcctctcctggtatcaggcctagatggtacttctccagccttccgtttcttgttctataaaacaggggtgatcacagcacctacctccgaaggttatcacgaggactgccatcgtggctgcagagtgccaggaccaccggcctggtatggaggtacacactcagtgaaggccatctgctgtcattgtcattgtcatagttattgccgtcattctgtggcttgtcaattccagaactggggatagaccccaggcctcctgaccaccagtctcatctttctcttatgcgatgacttaaatggtgtttctgttttttgcatgcaaatggtccgttcatctcctttgactagttatcaacttaccttcggatatattaactttatgtagcagttctttctatattgatggtgatgttctcttttccaattttattgctttgctttttgtagcagttttattacgtttttgttgtgaaagcttttaatttttacatatccaagcattcattttttgtccactcagtcataactttcattgcttctgtagctagatatgatgacattttctctagaattttaattacaaacaaaaagctgcaaccccagcccatcagaaggtgagtacaccaggtgggcaggctggatggaaatgggccagagaagcaggctctttcctcatccgagatgcggactccctgtctatctgtgggcaccacttgactatccaacctgaccactgcggcacactggagatgctcccatcatagattagccagaactctgtgactgctcatcattatagaccccgccagcagcagtggggcttggcctcacctagatcaatggagtggtccaaacttggtctgggagcaagcagcccagccatcctttgagctcctgggagccttggcaatgctccgagtggattcagtgactgagcagcagattcacccaagaaacatctccttggacacaagaagacttgcctagaccacatcctcctttcagccggtgactctagaactagaaagagattggttcataggcttctgctgtgggcagctaggggaaaattcacccatgtgttctggcatcacttcctatagccacacctaagtgagggcaacagagcagaggctcggagaggaaccctgcccctccgatggcttgtgcgttatgctgatagaagctggcagcactgccctgggctatgatttgcaacagccatgcccaggaggagcactaaagcaaaggtttggagggcagtggaacccttctgaaagcctgtgtggcatagaagtagaagctggtcctcctgggtctgagctaccatttccagtgggctcccccaagaggaacagcagcaagggctagcgaggaacctgcccctccagtggcccacagaagccacagatagaagccagccccaccagggctgtgctgtgacttcccagcagctgtggctggggacagggacactaggagggcctggcaaggaagtgtgcccttctcgtgggcccaccaaggctgaggcagagcttcctagcagacacaacttggaagggcttctcaggcacccatcctgacccccaggctggagaggagccaaaagcacttgttacatagtgattccttttgccctgtgggcctcagttcttgcagtagttgtgaatctgtgtctgaaatcactactttcttctcggatcctttttctcttttcgagttgttaggatgtgttttgtacagctgtcatttgataaagaaggttgacctctaccaggggcaagtctggcacctttacctagaagtactctgccatgtcttgcccgttcatttatcgtttgttgggtttcatgagggatcccattgaagtagatcccttttatgaagggatcccattgaatgcagcattaactcagaacgtagcataaagtcgtcactgctcccagctgggacgtggtgtcttggcatcccttcctgccgtccttgactctttcccatcttcagttctataattttctcccaaacaaatgctcttttagagttaacactaaagatctggtctttgccgtcaaggttgacagaacagctgttcatggtgtttgcggtgaaacccgtgttctctttcaatgcagtctgtggctttaacgtgtgtcctgtaatttcgccaagttcatttcttgcctctggtaacttgggggtggatttccttgggctctctaggtgtactgctatgtcagatgcaaaatgtcacccagcttcctgtcacatatccttgtctgtgcattcatgcatctacctcattccggttttctttctaatctcatgtattcctgttgtgaggaaatgtgttcttttcccgatccttttgtagttcatacacgtgacaattgggtttccacgcacgtgcatgagatgttcctccttcaaaccttgttactatgtcagcacattaactgcctggcatggaaaaagaaaaaaaaaaaagaaatatgttcttttcctaccatttgaaaaaaatcctccattgcttttattagagttttgaatacttgtgaaaattttcaaaagaaagtaattgattaccatttttgctgcttattacgatgagctgtgtccattagctgtgtcaccccactcttgcatttccagaatagtccctacccaattgcagcgggcatgtttttgagtggtgttgcattccatgtgcttgattttgtcctagaactggcacagcgcctgccctacctgcagccctgggttgtggccctgttgcgtaccatgtgatttgccaccccgcttctaggccatattaattcagccagaactgaacacctgacccaagggcagcaagcaatcatcagagcatagagctgacagaacatgatggaccacggacaccaccaggccttccagatctgaaatgcaaacaaggaaacagaagcttctaggcatcagaaggtgtggggagcagcacagtactcagaggagtgaggagcgtggcgcctgctgggaggaaggcctggccatgatgagtggccaactctggagcccaggatgttgcttcccagtctggtggtgaatcctccacaatctgagctggccctctggtgcccaaagcagactcctggggtccctgtattgggcacttacccacttcctgctggccgcagcatgacacctgatgctcctagagcagccaactgaattccagaagaaaggcttcagtggtgtgttttccagaaggaacctggctcctaggattaacagttgggtcaaatctcaaaaactctttgcccttaactgctgaaaactgccagcatctatagcagtcatagtcacaagatttcctttaaatttttcagcaattgttttcctaaggcattctgtaaagtctggcttgaagtttgtttagttgagataaaaatgtgtttgactgcactccagcctgagagacagagtgacatattgtctcaaaaataaataaacaaataagttttttaaaacatgtttg

SEQ ID NO: 681 - DNA, 3004 bp, Homo sapiens
ctggggtgagggaagtggaagcctctgtccatggggcctctgcgccgaattccgaccctgagtgggaggctgcacggtccccgctgtgacctggggcctaattccttgggctgcagccaccgccggcggcgaagaggagcccggggcccggccggctgccacccacccacgccaccgggtctcgggtccccacactgccgcgggcagtgcggaagcctaggaggcagccgggcgcccaggccgcgctgcgcggagcagccggagcagccacctccccagttaaggccaggcccacccggcctgggccttttcctgtgcctacacagtccggatagtgaggaacgctcaaacgaaacaactgcaaacagctgtctcaaatgtggagaagcattttggagaactgtgccaaatcttcgctgcctatgtgcggaaaactgccaggctgagagacaaagcagacctcctggtgaatgaaattaacgcgtatgctgctacagagaccccgcatttaaagctgggcctgatgaactttgcagatgagtttgccaaacttcaggattatcgacaagcagaggttgaaagacttgaagccaaagtagttgaacccttgaaaacttatgggaccattgtgaaaatgaaacgggatgacctcaaagcaacactcacagcaaggaatcgagaagctaagcaattaactcagttagaaagaacacgtcagcgaaacccatctgatcgacatgttatttcacaggcagaaacggaattacagagagctgcaatggatgctagccgaacaagtcgtcatctggaggaaactattaacaactttgaaaggcagaaaatgaaggatataaagactatattttctgaatttatcacaatcgaaatgttatttcacggcaaagctttagaggtctacactgctgcctaccagaatatacaaaacattgatgaagatgaagatttagaggttttccgaaattctctgtatgcaccagattattcatctcgtttagatattgtaagagcaaattcaaagtcacctcttcagagatcactgtcagctaagtgtgtatctggaacaggacaggtatccacttgtcgactaagaaaggatcaacaagcagaagatgatgaggatgacgagttagatgttacagaagaagaaaattttcttaagtaaactacacatttccattttcatcataaatgacttgaaatccacaatgactaaattgtagaactttatactcactttgctatgttaagcctcaaagtgaagtccaactggaaacagaaaaataattaaaggaaacttatgctgaccaaaaatgaaggctttaaaaaatattgcataccagtcatttcaacatcctacctagtgttacatgatttttgtgtaagtgcctttttttttaaagatggtgtatttcaaagtatttcatattaatgtactatatctacttgaagttccaatagtacattatgacagaaaccaaaagatctaacaattctgcttagctttttggttaagactccatgctttcattaccagaaaagggtcttacgtagtcattatgattcatggaattctattccatgaagccttaagaaaaaaaactttttttaactttccctgaaactttatcatttgataagtaaatttacttttcaagaagagtataaccaaagagtaaagataatgtgacactaagttatcaatgttttatgaatacacataaggcataaatttcagctgtaaaaaagctacattcaatctgactctggttttaaaacaaaactgctgtcataattatacatgatactgcaacttttggaaggctaatttggtggaatgttgcctcatcatagaacaccatagatcattaaaaattctataaaaattttaccaagctaccatatagttaataaaagggtatacagtcacttttatttctgaaaatataaaacattgagcctttcagtgtatctgatgcttctcttttggtaaggaatacttttatttcatggatcccaggcaggcatataaaagttacggaatttataaaatcatttgggataattagaaaatgcaattattcataacagaaaaataaagactttctagaaagcttctgactttgtcaatcatggctctgttcttaacaaagcactccttcctgagaatagtcctaagtgacaaagttgtttcagtacttttttgtaaaatatttaaaacattttaaaaccctaaattgatattcttaagaaactcaagatatcattggatatttactgcttcctcactcagtatttaaatttggttgtacttcgggggaaaacaacagagttattattttgctgcttactaaatagcaacttctcttgagcattatttgccttgtttgtaaagttaaaactgcgtaaaacagtaattctggaataaaacatacattctgcctacctcaaagaaatattctaagaacaaaaggaatactatccatgaaaatactttcattaatgtaaaattttcattatttagaccagcctaggttggcaaacttcttaaagggccagatagcaaatactgttattcttcgtgggtttaggcaaattcaagactattatacaggtaactatgtaaccatgtaagacttaagtacacttaaaaaatgtgaaaaaccattcctagcttccactacaacaacaacaaaaaacaggcaaccaatccaaccaacccagcctgtaagtctccatctcttatctccaaaataggaatacaaattgagtatcctttatctgaagtgcttgggaccagaagtatttaagactttggatttcttcagattttggagtatttgcattataccagttcaacattcctaacccaaaaatctgaaatcttaaatgctgcaatgagcattttctttgagcatcatgttggcactcaaaaagtttgtgattttcggagcatgtgaaatttcagattaccagattaggaata

SEQ ID NO: 682 - DNA, 2846 bp, Homo sapiens
tgaaaggcacttgtgcagttgacttgtcctgctccactgttttggaactctgaaaccatggaaagaagcctggctgaggtgctagacaataagaaacacgtggcccctgctgacgacctgccaatgccgtgacacagaagtgaggcctcttagatcatccagccgccagctgaccagaaaggaacgctcaaacgaaacaactgcaaacagctgtctcaaatgtggagaagcattttggagaactgtgccaaatcttcgctgcctatgtgcggaaaactgccaggctgagagacaaagcagacctcctggtgaatgaaattaacgcgtatgctgctacagagaccccgcatttaaagctgggcctgatgaactttgcagatgagtttgccaaacttcaggattatcgacaagcagaggttgaaagacttgaagccaaagtagttgaacccttgaaaacttatgggaccattgtgaaaatgaaacgggatgacctcaaagcaacactcacagcaaggaatcgagaagctaagcaattaactcagttagaaagaacacgtcagcgaaacccatctgatcgacatgttatttcacaggcagaaacggaattacagagagctgcaatggatgctagccgaacaagtcgtcatctggaggaaactattaacaactttgaaaggcagaaaatgaaggatataaagactatattttctgaatttatcacaatcgaaatgttatttcacggcaaagctttagaggtctacactgctgcctaccagaatatacaaaacattgatgaagatgaagatttagaggttttccgaaattctctgtatgcaccagattattcatctcgtttagatattgtaagagcaaattcaaagtcacctcttcagagatcactgtcagctaagtgtgtatctggaacaggacaggtatccacttgtcgactaagaaaggatcaacaagcagaagatgatgaggatgacgagttagatgttacagaagaagaaaattttcttaagtaaactacacatttccattttcatcataaatgacttgaaatccacaatgactaaattgtagaactttatactcactttgctatgttaagcctcaaagtgaagtccaactggaaacagaaaaataattaaaggaaacttatgctgaccaaaaatgaaggctttaaaaaatattgcataccagtcatttcaacatcctacctagtgttacatgatttttgtgtaagtgcctttttttttaaagatggtgtatttcaaagtatttcatattaatgtactatatctacttgaagttccaatagtacattatgacagaaaccaaaagatctaacaattctgcttagctttttggttaagactccatgctttcattaccagaaaagggtcttacgtagtcattatgattcatggaattctattccatgaagccttaagaaaaaaaactttttttaactttccctgaaactttatcatttgataagtaaatttacttttcaagaagagtataaccaaagagtaaagataatgtgacactaagttatcaatgttttatgaatacacataaggcataaatttcagctgtaaaaaagctacattcaatctgactctggttttaaaacaaaactgctgtcataattatacatgatactgcaacttttggaaggctaatttggtggaatgttgcctcatcatagaacaccatagatcattaaaaattctataaaaattttaccaagctaccatatagttaataaaagggtatacagtcacttttatttctgaaaatataaaacattgagcctttcagtgtatctgatgcttctcttttggtaaggaatacttttatttcatggatcccaggcaggcatataaaagttacggaatttataaaatcatttgggataattagaaaatgcaattattcataacagaaaaataaagactttctagaaagcttctgactttgtcaatcatggctctgttcttaacaaagcactccttcctgagaatagtcctaagtgacaaagttgtttcagtacttttttgtaaaatatttaaaacattttaaaaccctaaattgatattcttaagaaactcaagatatcattggatatttactgcttcctcactcagtatttaaatttggttgtacttcgggggaaaacaacagagttattattttgctgcttactaaatagcaacttctcttgagcattatttgccttgtttgtaaagttaaaactgcgtaaaacagtaattctggaataaaacatacattctgcctacctcaaagaaatattctaagaacaaaaggaatactatccatgaaaatactttcattaatgtaaaattttcattatttagaccagcctaggttggcaaacttcttaaagggccagatagcaaatactgttattcttcgtgggtttaggcaaattcaagactattatacaggtaactatgtaaccatgtaagacttaagtacacttaaaaaatgtgaaaaaccattcctagcttccactacaacaacaacaaaaaacaggcaaccaatccaaccaacccagcctgtaagtctccatctcttatctccaaaataggaatacaaattgagtatcctttatctgaagtgcttgggaccagaagtatttaagactttggatttcttcagattttggagtatttgcattataccagttcaacattcctaacccaaaaatctgaaatcttaaatgctgcaatgagcattttctttgagcatcatgttggcactcaaaaagtttgtgattttcggagcatgtgaaatttcagattaccagattaggaata

SEQ ID NO: 683 - DNA, 3004 bp, Homo sapiens; identical to SEQ ID NO: 681

SEQ ID NO: 684 - DNA, 3865 bp, Homo sapiens
gcggctgcttgcgccccagcgcgcgcccaggcgccttggaatccccgtccttgggcccccgcaaggtccccggccgtgcgcgaggcagcatgatgaggcgcaccctggaaaaccggaacgctcaaacgaaacaactgcaaacagctgtctcaaatgtggagaagcattttggagaactgtgccaaatcttcgctgcctatgtgcggaaaactgccaggctgagagacaaagcagacctcctggtgaatgaaattaacgcgtatgctgctacagagaccccgcatttaaagctgggcctgatgaactttgcagatgagtttgccaaacttcaggattatcgacaagcagaggtatggagtgagatcacagtgtcattgttatgaatgagccatgaagtagtggatgaaggaaccgtggaaactttcacttgtaatctacctaactgcagaggtggatgcaaacttgataaaacgtacattttcataagactgtgtgagtctattaaagagaagcgttctgtgttttattttacccttttcaagctaacctttagggcatcttgaggtcttgaatttccccactttatttgccaacttttggccaaggggtggctgtttactgggggtagtgggaatagtacccagggggaagaaaataagcataacttaatgtcttgtgtggcacataagtacgttttaaagaatgactggagatggaaatgttgggaatggtaatgtggatggataaattattaataaatgggtaagacatcattgctgcatccatggtttggaaaattgaccaatggtttactaacaacaacaaaatgctatgaattgtatcatggaagcaaaccaatactgagacaccgtgtggactttttgctctgggtagcaggagaagtgtccttgtgattgttttctttctaaaagcccatatttttcctttaaatacttaataagcacttttacttgtatttattttcagtttcacggcataggttaacttatcagaagttgcccagttagaactgcgttgcttttttatacttttcagaacctaaaacgggaatttcaattttcaaaaaacagaatgagtataaaaaaaattgaactcatcattgctatccatacaaatttgaagagtaatcatatttggaggtacttttggaaaaatgtggagttcttgtcatgaaacttctgtaataaacaagtaactctcaattatatatgataactggggacttaatgtttcaaagataatttatattcacaggtaatcctaaaatcttattttagccaataatttcaatgcccctttgtagaaaacctttgtgctatttatcaaatagcaaagtgaattgatttgcatttgttctccttttatttcccttgcttaccaaatggtggaggtcctaatgaacaatgacaaaaaggttgaaagacttgaagccaaagtagttgaacccttgaaaacttatgggaccattgtgaaaatgaaacgggatgacctcaaagcaacactcacagcaaggaatcgagaagctaagcaattaactcagttagaaagaacacgtcagcgaaacccatctgatcgacatgttatttcacaggcagaaacggaattacagagagctgcaatggatgctagccgaacaagtcgtcatctggaggaaactattaacaactttgaaaggcagaaaatgaaggatataaagactatattttctgaatttatcacaatcgaaatgttatttcacggcaaagctttagaggtctacactgctgcctaccagaatatacaaaacattgatgaagatgaagatttagaggttttccgaaattctctgtatgcaccagattattcatctcgtttagatattgtaagagcaaattcaaagtcacctcttcagagatcactgtcagctaagtgtgtatctggaacaggacaggtatccacttgtcgactaagaaaggatcaacaagcagaagatgatgaggatgacgagttagatgttacagaagaagaaaattttcttaagtaaactacacatttccattttcatcataaatgacttgaaatccacaatgactaaattgtagaactttatactcactttgctatgttaagcctcaaagtgaagtccaactggaaacagaaaaataattaaaggaaacttatgctgaccaaaaatgaaggctttaaaaaatattgcataccagtcatttcaacatcctacctagtgttacatgatttttgtgtaagtgcctttttttttaaagatggtgtatttcaaagtatttcatattaatgtactatatctacttgaagttccaatagtacattatgacagaaaccaaaagatctaacaattctgcttagctttttggttaagactccatgctttcattaccagaaaagggtcttacgtagtcattatgattcatggaattctattccatgaagccttaagaaaaaaaactttttttaactttccctgaaactttatcatttgataagtaaatttacttttcaagaagagtataaccaaagagtaaagataatgtgacactaagttatcaatgttttatgaatacacataaggcataaatttcagctgtaaaaaagctacattcaatctgactctggttttaaaacaaaactgctgtcataattatacatgatactgcaacttttggaaggctaatttggtggaatgttgcctcatcatagaacaccatagatcattaaaaattctataaaaattttaccaagctaccatatagttaataaaagggtatacagtcacttttatttctgaaaatataaaacattgagcctttcagtgtatctgatgcttctcttttggtaaggaatacttttatttcatggatcccaggcaggcatataaaagttacggaatttataaaatcatttgggataattagaaaatgcaattattcataacagaaaaataaagactttctagaaagcttctgactttgtcaatcatggctctgttcttaacaaagcactccttcctgagaatagtcctaagtgacaaagttgtttcagtacttttttgtaaaatatttaaaacattttaaaaccctaaattgatattcttaagaaactcaagatatcattggatatttactgcttcctcactcagtatttaaatttggttgtacttcgggggaaaacaacagagttattattttgctgcttactaaatagcaacttctcttgagcattatttgccttgtttgtaaagttaaaactgcgtaaaacagtaattctggaataaaacatacattctgcctacctcaaagaaatattctaagaacaaaaggaatactatccatgaaaatactttcattaatgtaaaattttcattatttagaccagcctaggttggcaaacttcttaaagggccagatagcaaatactgttattcttcgtgggtttaggcaaattcaagactattatacaggtaactatgtaaccatgtaagacttaagtacacttaaaaaatgtgaaaaaccattcctagcttccactacaacaacaacaaaaaacaggcaaccaatccaaccaacccagcctgtaagtctccatctcttatctccaaaataggaatacaaattgagtatcctttatctgaagtgcttgggaccagaagtatttaagactttggatttcttcagattttggagtatttgcattataccagttcaacattcctaacccaaaaatctgaaatcttaaatgctgcaatgagcattttctttgagcatcatgttggcactcaaaaagtttgtgattttcggagcatgtgaaatttcagattaccagattaggaata

SEQ ID NO: 685 - DNA, 2846 bp, Homo sapiens; identical to SEQ ID NO: 682

SEQ ID NO: 686 - DNA, 1317 bp, Homo sapiens
atgactcagtcatctcggtctgacattgttcagaaaaaaaggaatggggcgggggtagaattcattcattcaactgtgctagtcactgaactaggtactgagtacagtggtgaatcaaagacagatgcctttggacccttgcagaaagaagtccaaactaagcacagtcccctcatcgtagtaacagctcctatcatggaaaattggccattcctacagattaataatgaatcagtgaccaaggaacatcttcagaacaaacagaaaagcaaagcaagtgggagaagtttacttctaaacttccagatagttttcgaaaattatcccaagtcctccagacttccttgtcgtgtggcctcagtccttcgccgtccctcgccgtccttcgccatcgcacgccaccgcaccccatctctcgaaatctgcagacatcttgatttttcccacgctgtctgtcaggtctccgccgccactcgacgccagggcgccgggccttgtgggctgtgctgcacctcggacggcttcgcaccagccagcgccctctctctcctgcagcactctgatctgcaccccctgaggggcttccactgtccgcggggtgagaatgcccctgggagtgtcacatgactgccgccccatgtgtgtgagaggcgtcctctgggagagcatggatcctgaggtcccagctgacctctgtcctgtgtgcccagtggccccaggtgacgtgtcttcaagaagaggctgagctgcggtgcttgtaagagtcatgtgctgttcctggggcttggatgatgtaggggaagcaaggtgaaagtggtatcccgtggttccacgttctgtcctgctgtggggctgtccctcacatgctttcagtggctgttgcagaggaagagcctccggaaatctgcgtgggtaaagtctcagccttagatccaaggacagtccaaggaagtcctaagaccatggagttggtgatctgggatctgggtttgctgatatttctcaccgtgaatctcttggtggtgtttgtgggcacgagaggggcagagaatggagagtgaggctaccacatgaagcgtcaccagagctgctccctgctgcctgctcagagcaccccggatccactgttcaatctgcacaagattcggggtccagacatgggagacttcagctgcctcagaggaccgtggacagggaaggccagcctcgcatccctctgtccatgcctggaatgactttaataaccaagagttttatttttgaatttgtagctgtcgttcactttttacccacccattcaataaaccttacagaatt

SEQ ID NO: 687 - DNA, 5004 bp, Homo sapiens
acaaaaccctgcaggagactgcgagccctgcagaactgctagctgcgggggagagggcaggggtcgggcgcctgtggcggagccgggctggggccagggcagggaggctgacaagcggcgggagaagccggcggagggcgggatcgcgcctcctgacatgttgggggtatccctggccgggccgggccggggctaagagcggcgctgcgggccggggtcggggtcgggtcgcggtccgcccccgctgtccctccgtcctgccctgtcgaggacgtgcgttccgcactcggccgcctccagagggagcgagggaagcggctagaggatcggggagaaggagcattcgccggaggctggaggaggctgacccgcgtccccgcccagcctgctcctatgcggtacttgaaggatggcgaagaggtcgcgcagtgaggatgaggatgatgaccttcagtatgccgatcatgattatgaagtaccacaacaaaaaggactgaagaaactctggaacagagtaaaatggacaagggacgaggatgataaattaaagaagttggttgaacaacatggaactgatgattggactctaattgctagtcatcttcaaaatcgctctgattttcagtgccagcatcgatggcagaaagttttaaatcctgaattgataaagggtccttggactaaagaagaagatcagagggttattgaattagttcagaaatatgggccaaaaagatggtctttaattgcaaaacatttaaaaggaagaataggcaagcagtgtagagaaagatggcataatcatctgaatcctgaggtaaagaaatcttcctggacagaagaggaggacaggatcatctatgaagcacataagcggttgggaaatcgttgggcagaaattgccaaactacttccaggaaggactgataattctatcaaaaatcattggaattctactatgcgaagaaaagtggaacaggagggctatttacaagatggaataaaatcagaacgatcttcatctaaacttcaacacaaaccttgtgcagctatggatcatatgcaaacccagaatcagttttacatacctgttcagatccctgggtatcagtatgtgtcacctgaaggcaattgtatagaacatgttcagcctacttctgcctttattcagcaacccttcattgatgaagatcctgataaggaaaagaaaataaaggaacttgagatgcttcttatgtcagctgagaatgaagttagaagaaagcgaattccatcacagcctggaagtttttctagctggtctggtagtttcctcatggatgataacatgtctaatactctaaatagccttgacgagcacactagtgagttttacagtatggatgaaaatcagcctgtgtctgctcagcagaattcacccacaaagttcctggccgtggaggcaaacgctgtgttatcctctttgcagaccatcccagaatttgcagagactctagaacttattgaatctgatcctgtagcatggagtgacgttaccagttttgatatttctgatgctgctgcttctcctatcaaatccaccccagttaaattaatgagaattcagcacaatgaaggagccatggaatgccaatttaacgtcagtcttgtacttgaagggaaaaaaaacacttgtaatggtggcaacagtgaagctgttcctttaacatccccaaatatagccaagtttagcactccaccagccatcctcagaaagaagagaaaaatgcgagtgggtcattccccaggcagcgaacttagggatggctcattgaacgatggtggtaatatggcgctaaaacatacaccactgaaaacactaccattttctccttcacagtttttcaacacatgtcctggtaatgaacaacttaatatagaaaatccttcatttacatcaacccctatttgtgggcagaaagctctcattacaactcctcttcataaggaaacaactcccaaagatcaaaaggaaaatgtagggtttagaacacctactattagaagatctatactgggtaccacaccaagaactcctactccttttaagaatgcgcttgctgctcaggagaaaaaatatggacctcttaaaattgtgtcccagccacttgctttcttggaagaagatattcgggaagttttaaaagaagaaactggaacagacctattcctcaaagaggaagatgaacctgcttacaaaagctgcaaacaagagaataccgcttctgggaagaaagtcagaaaatcactagtcttagataattgggaaaaagaagaatcaggcactcaactgttgactgaagacatttcagacatgcagtcaaattgtgaatgggaaacagtggtttatgggaagacagaagaccaacttattatgactgaacaagcaagaagatatctgagtacttacacagctaccagtagtacttcaagagctctcatactgtaattgttattaaaattgatgaaatgccccactcccttactgcagtctctactaaattaggttgcagtgaaatttttctcaattagttgtttttaaagttgtaagatagcccttttaatacagcatcttttttctattctatatagtaggcagaaagctagtaagtcacttaaggggtagatagtttcatagtttattttttaagagatgagatttttaaaaattgtttttaaagaacaagatgggaaaataatagaatgttcatggatttctaaaagtaaattctcatatattttcttcacaagatatatgttgctactctcttgatgctgcagttttgttatagataggtgtatgagtatatatgatttctgaaattagtctatgtatggaaagcacacatgattttatgaagtacttttgcccatgtgctgatttacttaggctaccatttacaaagaaacacattgaaaaggaatttaaaggaaggatagaaagttgcactactaattttttgttttttttttcagaagcagtaaaattaactacagtgttaaatgtatttatttgagcatagtactgaaaacaaaaagcattcaaaaaagagttttttctttattagtaaatagtattttcttaatctcagaggagctgagagttttgttgaatgtattgtacagtatgtaggagcaggagaactttgtaaattggaaagaagtctgtttttataatttatttttatttttaaagcttaaatgtagatatttatacgtatacagggtgcctagaagccaatgttgtttcctgttattacagctaacacagtaaagaataattttgactttaagtatgaaacagtagtaagttatagctgcaaagaatacaatatctatactgtatgtcacatctacctaaatgttgcactatgccctttaaatcatgctggttataaagtagttctaaaaatgtactaaataataatttaatattttctttttaaattatatcgggggtggtcatatacattaatctggtgatttgtatatgtgtttgaaatttttgcattttgtttaaaaaataatatggtaccttggtccctaaaaacagtctgcacttagaagtttatatttactcagtgtttcagaagtggagaacattatcttttatttataaaaatattttgtccttttttaaatgttttgtgtttctctacaggttacaacagttgcttcagttgcctgttttaggtgtttgcacttattttatttcttcttgaaagaatttttatttgcttttgtggtagagattatatgtaattttttttcagtcatataatggtgtgctgtcaacttaaacactgacaggtaaatagaattgtacactgtagtttgaattatttataattgacacactctctccctctccactcctgaagtatgctgctatagaaaatagcagaatcggcttgctgctacgagagaaggaaagagcgaccaccacttgcactgtgtgaaaagataaaaaacaaatgatggcaagttctcaagttaactaaatggaatcaaccattaccaggcaaattcttgcaaataccaaaatactactatgccttataaaacaaaatgaaagcaggttaagattttctgctctgtttgtatgttaatagaaatggaaatactaagtattttaatgcttagctcttgaacagtagacctaaaagggttttaagctatttaaatctacttgctagtttttgcatattttatatatatatatatttatatatatatatagtgagaagtgaagaaaatgtatggtactaagattatgccttattgataaatagataaaccaatttgaatcctcttagcatgtttaagtatgttgattgctttctaattaatgaacttctcacagaaatttcacttagtgaaaccaatgattgtagcaaactcatactggatcatttcagttaccttgaactaatagcacataatggttttttgttgttgttgtttttaatgtagcccttacctggatatacatagtctgcaatcaccaaagtataatatcttgtaaggctatattttttaaagcatattttttcttgagcattaaattatcctaaatggtaatatattgtggataagtctgggcttattggacataatacatatttgggttggtactggttgaatccttcagttaactgctttgttgctttttgcaagattttttatcttaaacatgtcaggcatcttaagtcacctttatactgttttgttcctctgagtttctttcagtatgttatacaaatgccagacataacatgtagcagccatacttgcatggaaactgactacacatacataatactgcattttattgtaaggttttcacattaatacagcaattaccctgactaaattgagttttgtgatatatggaaaacttcattgtaagagaatcttgcatacaatgttgacatattaacatccaaaataaagcatctgtgtaca

SEQ ID NO: 688 - DNA, 5004 bp, Homo sapiens; identical to SEQ ID NO: 687

SEQ ID NO: 689 - DNA, 2006 bp, Homo sapiens
cgcggccggagctgtgggctggcagccatgggtgccaggcagtgctgagagcagtggggcatggctgcagccctgcaggtcctgccccgcttggcccgagcccccttgcatccactcctctggcggggctcagtggcccgtctggccagcagcatggccttggcagagcaggccaggcagctgtttgagagtgctgtaggtgcagtgctgccgggccccatgctgcaccgggcactatccttggaccctggtggcagacagctgaaggtgcgggaccggaactttcagctgaggcaaaacctctacctggtgggctttggcaaggctgtgctgggtatggcagctgcagctgaggaactactgggccagcatcttgtgcagggcgtgatcagcgttcccaaggggatccgtgctgccatggagcgtgccggcaagcaggagatgctgctgaagccacatagccgtgtccaggtattcgagggtgcggaggacaacctcccggaccgcgatgcgctgcgggctgcactggccatccagcaactggctgagggactcacagctgatgacctgctgctcgtgctgatctcaggtgggggttcagctctgctgcctgcccccatcccacctgtcacactggaggagaagcagacactcactagactgctggcagcccgtggagccaccatccaggagttgaacaccattcggaaggccctgtcccagctcaagggtggggggctggctcaggccgcctaccctgcccaggtggtgagcctcatcctgtcagatgtggtgggggaccctgtggaggtgattgccagtggccccaccgtggccagttcccacaatgtgcaagattgcctgcatatcctcaatcgctacggcctccgtgcagccctgccacgttctgtgaagactgtgctgtctcgggccgactctgacccccatgggccacacacctgtggccatgtcctgaatgtgatcattggctctaatgtgctggcgctagctgaggcccagcggcaggccgaggcactgggctaccaggctgtggtgctgagtgcagccatgcaaggtgatgtaaaaagtatggcccagttctacgggctgctggcccatgtggctagaacccgcctcaccccatccatggctggggcttctgtggaggaagatgcacagctccatgagctggcagctgagcttcagatcccagacctgcagctggaggaggctctggagaccatggcatggggaaggggcccagtctgcctgctggctggtggcgagcccacagtacagctgcagggctcgggcaggggtggccggaaccaggaactggccctgcgtgttggagcagagttgagaaggtggccgctggggccgatagatgtgctgtttttgagcggtggcaccgatgggcaggatgggcccacagaggctgctggggcctgggtcacacctgagcttgccagccaggctgcagctgagggcctggacatagccaccttcctagcccacaatgactcacataccttcttctgctgcctccagggtggggcacacctgctgcacacagggatgacaggtaccaatgtcatggacacccacctcttgttcctgcggcctcggtgatggcataggtcacattttgggagttcagaggaggcctacaagggcaaggtcagatggcagagcaaggttggtcctcagggcctctctaagccttagggcccctcctctccttggccttggctgtttggttaactgtcaccttccactcagggcctctgctctatatctattcccttccagccagactggcagatgggggcttccccctacccctgaggatgaggacaagcccctcggccagttcagcgttcccgtgcttctcccttgggcagcctctctcttgagcccctcaccctgtttctttctgtgaagcgagaatgtctgaaaataaataggaccatgccatgggtaaaaaaaaaaaaaaaaaaaaaaaa

SEQ ID NO: 690 - DNA, 2889 bp, Homo sapiens
tggacgacagagcagactccatctcaaaaaaaaaaaaaatggtcaccccttttgctcctaaatcaccctcaaagtaaaagagaacaagaaacagaagcagaaatccatatttagtgaaataagacaacacctgtagctccaaacctgtagaagcagatcccagagaaaagcaggccagttctctcctggaatcccagaaagtcccaggaattggaggcttcagtgctgcagtagggaggggactaaaaacaaagtctgtatatggagcagtaagacctccgggttctcatcccccatcctgtgtgctctcgggtgactagccctctccctctccaggtttagcttctggagaaattaaatcaaagaggctctagaactggggatggcaggcattgagtgcagggagtgagttgccagaggctgagagcagagagatttagtggcagtgggcagagcaaacagcaaaatgactgccctcttccctggccttgctccagaaactgagcagccagacatacacactcccagaaggcagttggaggtccccccgggcaatcagaaccacccacagagaagacctccagatactgacatttagaagcctctgaccaaagagctgcctggccacccactggcttactcgctgacaggccatgctcctgccgtacacaccgatcctatcagtcatcctcatgggctcctttccagacttctgaggaaagcttccaacatgaagagggagttcaaaacaaacagagagagagagagagagagagagaaaagaaatataaacaatgcagggagcaaaagataacttcaaataaactcaaaatattcttctgggagagatgagacaatattgcatacataaaacaagaagaggatgctatcactaaattttaaaaaaaagtaacagaaagtaagaaagacctctaagaaatgtttctgaaatgaggtataatttttttttttttgagagggagtcttactctgtcacccaggctggagcgcagtggcgtgatctcagctcactgcaacctccgtctcccgggttcaagtgattctcctgcctcagcttcctgagtagctgggattacaggcatgcgccaccatgcctggctaattttgcatttttagtagagacggggtttcaccatgttggccaggctggtctgaaactcccgacctcaggtgatctgcccacctcagcctcccaaagtgctgggattacaggcatgagctaccgtgcctggcctgtgtatttttggagacagagtcttgctctgttgcccaggctggagggcagtggtgcaaactctgcctcccgggttcaagcgattctcgtgcgtcacctcccaagtagctggggctagaggcatgtgccaccatgtctggttactttttatataaaccttcagtttaatcttttagcttactgctgtgtttttcagctttattcactttgctttttttctatattttcgtttcaactcaacttttaaaaaatcatacttgtatatttgtatatttatatttattttccaagacctcatttgcctctttttcataatgggctattattgctccatggtacagaatcttctgttctttcctaaactattagttatttttaaaatatttgttaactttctcccccttgctagttctcaggtacccgctttctcccagagtgctggctttccttaattatttgctgacttgtgctggtgtgtaacccttcatacttaggtatttctatttgtctgactgctgatttgattccaatccagtgtttcttctgattcgtggagaagagacgacaacgctgtgaggctctggttttggtggcttgtctgggtgtgggagctccttgtcatcatgggatttttagctccctgggtcgccatcctacatggccactctcctgccgatgctgcccgctactcagcaggaggggaagtcgagaccacctccttaaccttacagacattgattgtgagcttggagcaccttccgtgactggaccacccatgcagtggtcctttgctttttgcatttttaactgcaattttccccaagagtcttccctaatacagtctcttaggaattgacggtgggattaaacaaggcatgtttctgcactgaatatggtctatgggttgccactttgcaacctcagctttaaggcttatttcctcccaggaaactgatgttaactttttaagttaaaaatgtgtatataagtaatacatgtttattttggaaattagaaaatacaggccaggtgtggtggctcatgcctgtaatcccagcattttgggaggttgaggcaggaggattgcctgagcccaggagtttgagaccagcctgggcaacatagggaaattccatctctacaaaaaaattaaacattagctgggtgtggtggtgcccacctgtggtcacagctactcgggagactgaggtgggaggatagcttgggcaggggaggttgaggctacagtgagccacgatcacaccaatgtgacacagtgagaccctgtctcaaaaaaaaaaaaaaagaaagaaaatataggtaaacacaaagacaaaaaagcagggcatggtggctcacacctgtaattctagcaccttgggaggctgaggcaggaggatcacttgaggtcaggaactcgagacgagaccaggctgggcagcatggcgagaccccatctctataaaaagtacaaaaattagcagggcacggtggtgtgcacctgtggtcctgctacttgggaagttgaggtgggaggatcacctgagccctggaggttgagggtgctgtgagccatgatggcaccactccactccagtccaggtgaaagagccagatcctgtctcaaaaaaaaa

SEQ ID NO: 691 - DNA, 2000 bp, Homo sapiens
atcttcttcctgccctcgccgtggcgggcgacggtttctcgcgccgtggctggctcggccggccggggcaccgcgccgggctccatgcagccgggctgcgcggtcccgcagagcgggcgcctccggggctcgagtcggggacccggcaggagcgggccggggatggcggcggcgggcggcgggtcggccgtggagccccggagaggcggccgccaccaccgctgcccgcagtctgcgaggtgtccggcggtccgctcagggcctcttttgcagactcggtgcccggagtgcgccggcgccgcccgccaggtcttggcactgctggcgcggccgcggcggcgggggcccggctccagatcaccgacccccacgagcgccggccctgcctgcccgctattttggttccatctcttctgcatatttatgcttgcctgttacattccctggcctctgagtgtcctttggcagtttccaaagcatttgggcaagaaggagcttgggcagcttcacaacaggtggggacgcgcaggggaggggccgcggccggaccggcagagtttcaagggctggcgcgccggcggactttccacactgtctttcgggactggggttaggagacagcccttggccaccactgtgtccttactttgtcgctttacttggggctggacctcccctttccagctctggcgtgtgaccccgcaacgagcgtggtgtcgagaccaccaccagctggggcggtgggagcgaaggtgccccaggctcggggaaggtggaaaccttttccccgctccccaagtgattgttgcgcgctccggtgaggggacagtggtacctcgatttcccgtgtgccagcttcgggactcagctgtgcttttgtgtctctttgattagcaaaagcaaaacgaattcctccccgaacactaagcttcctggaaacttccctagacctaaacttgagaaccgcatataaatgggccttgagggttctgtcgtcagtagcgggttacgtgattgcaaacgagcaagtttaaaacggagtgggctttgggctgcagagccgcctggcattctgacagctgagcaggaggcagaggtgagagtccaagatggactaaaaatgtcccagcagctgggagcccaacctcggcccaacctcgttgaaaggaggaacattcggtgcagccgtcggaaccttattatttatgaaaggggacagctcacaggattacatttttctaagccaatcctgtgaccatcctccatgaaattctctattttggttgcatgtggtcaaaactgagcctcactgaaacaattgaaaacaaatactcccgacaaatcttaagaatcgttttgaaaatcaaaaggtggggaaaatgttgtggcttctgagctttcttcagcccatattctattattctctgatgttttatggtgtaaaatcatacccattccattatgtattgattgtcaagaaggaagtaggcttttattgctatttttatgtcagtttccatttactgtctcaccacatttattgggttattgcctttgcctttgactcaacaggagctggaagggtaggaatcccaaattctgttgcctaaggcagccagttgtcagaatggactttcctcattttctattatgaggcctgaggaaagacattcagttccaaaggctgtgcctatccttttaaatagaagagagagggcccggcacggtggctcacgcctgtaatcccagcactttgggaggccgaagggggcgaatcacgaggtcaggagttccagaccagcctggccaacatagtgaaaccccgtgtctactaaagatacaaatattagccgggcgtaatggcgggcgcctgtattcccagctactcgggaggctgaggcaggagaatggcttgaatccgggaggcggaggttgcagtgaaccgaaccgagatcgcgtcgctggactccagcccgggcgacagagtgagactccgtccc

SEQ ID NO: 692 - DNA, 1444 bp, Homo sapiens
actatgccccaggccctgggattttgaacagctctgcaggtgactgaaaggtgcggccaggctggggaacgacctggtttcagccccagccccgccactgactgactttgtgagtgcgggcaagtcactcagcctccctaggcctcagtgacttccctgaaagcaaaaactctgcaaaggggcagctgggtgctggctcacacctgtaatcccagcactttgggaggctgaggtagacaaatcacttgaggccaggagttctagaccagcctggccaacatggtgaaaccccatctctactaaagaaaaaaaaaaattagctgagcatggttgtacatgcttgtaatcccagctacttgggatgccgaggcgggaggattgcttgaacccaagaggtggagtttgcagtgagctgagattgtgccacactgcactccagcttgggtgagagtgagactccatctcaaaaaaaaaaaaaaaaagagagaatcccactttcttgctgttgtgatggtggtaagggaacgggcctggctctggcccctgatgcaggaacatggagctgatccaggacacctcccgcccgccactggagtacgtgaagggggtcccgctcatcaagtactttgcagaggcactggggcccctgcagagcttccaagcccgacctgatgacctgctcatcaacacctaccccaagtctggcaccacctgggtgagccagatactggacatgatctaccagggcggcgacctagagaagtgtaaccgggctcccatctacgtacgggtgcccttccttgaggtcaatgatccaggggaaccctcagggctggagactctgaaagacacaccgcccccacggctcatcaagtcacacctgcccctggctctgctccctcagactctgttggatcagaaggtcaaggtggtctatgttgcccgaaacccaaaggacgtggcggtctcctactaccatttccaccgtatggaaaaggcgcaccctgagcctgggacctgggacagcttcctggaaaagttcatggctggagaagtgtcctacgggtcctggtaccagcacgtgcaggagtggtgggagctgagccgcacccaccctgttctctacctcttctatgaagacatgaaggagaaccccaaaagggagattcaaaagatcctggagtttgtggggcgctccctgccagaggagaccatggacttcatggttcagcacacgtcgttcaaggagatgaagaagaaccctatgaccaactacaccaccgtcccccaggagctcatggaccacagcatctcccccttcatgaggaaaggcatggctggggactggaagaccaccttcaccgtggcgcagaatgagcgcttcgatgcggactatgcggagaagatggcaggctgcagcctcagcttccgctctgagctgtga

SEQ ID NO: 693 - DNA, 5088 bp, Homo sapiens
aagaatcatctttcagtgacttatctgattatgaccatgtctctgaacttgctaaatctggtaaagaaaagacacagccttctctctattcagctacatttttggaagacataatcattgaccttgttcacaaattttgttctctcctcattattactgaagattctaagaaaaatgaaatggcagagctagatattatgggcttggctctaaaacttgcaaattctctgataagggaatttaagaaaagtgatattaaagttttaccaaatgctgaaaaaatgttttcttttccaccaattgataaagagacagttgataaaatatccaattttgtatatgaacagttcatagaaaaatgcacatctcatgatattcaaaaaggtgatgaaagtaacattgctatagggatgattgctgctctaacccagaaggcaatatctgcattcaggattcaaccacttttttcaggagactggtcttccaccttcttttcatttctaaatccagataatatcacccaaagggttcaacacctaccacaaaacacctttacacaaataagcagatgtgcaaaagagaaccaactttctttaccagatcaatcatataaagatacttcttccaccccagattgcaaaaacatgatgagcactttggaaataaatagaggtacaatgaatagaaagaaaagttttaaaaccaaggacacatcagtgaaaaaaggtgacatccaaaatccagtacttagctctataaatgcaattatgaaaagcggcatgattaacctaacatcagggttggctacaggtgtgacaaataaaaaggaagtggatgaaaataaagtgggaatttgtactcaaaaacatagtgagaatgtatcaaaagttacttcaactaccactgtgaaaagtaaagatactcaggagccaaatttgagtgaaacatttaataataatgaaattgagaagaaaagaaatttaattccaacagataaaaaagggaaagatgatgagatatacacacatttttcattaataattgatgatacagaatatgagaaggaagtacttggatcagattctgaaataggctataaaaagaagattgacaatgcaagggaaagctcatttaaaaaagatgacaagctctttcagttatcctccttgaagtccaagagaaatctagggactacaacagatactttggaaataagaattcgaacatcaagcaatgaggggagaagagactctccaacacaaacgtgtagggatgaggaacaccactcagattatgaacatgttcaaaatgtcattgaaaatatttttgaagatgttttagaactatcttcttctccagaaccagcatattattcgaaactcagttatgaccaaagccccccaggtgataatgtattaaatgtaattcaagagattagcagggattcggcacagtctgttacaacaaaaaaagtatcctcctcaactaacaaaaatatctctgccaaagaaaaagaagaggaagagagagaaaaagagaaagtaagagaggagattaaaagtgaacccagtaaaccagatgatcctcaaaaccaacgagaaagtaaacctggaatttttcccgctaagtttttagaagatgttattactgagatggttaaacaattgatcttttcttctataccagaaacacaaatacaagatagatgtcaaaatgttagtgataagcaaaatcaagccaaactctatgacactgctatgaaactcatcaattcactgttaaaggagttctcagatgctcaaattaaggttttcaggccagataagggaaatcagttccctgggggtaaagtgtcttcagttcctaaagtacctccaaggtataaagagccaactacagatgaagcaccatccagcattaagataaaatctgcagataaaatgccacctatgcataaaatgatgagaaaaccttcttcagataagataccatcaattgacaaaacattggtcaataaagttgttcactcctctgtttgtaatattttaaatgactatggatctcaagactctatttggaagaatataaacagtaatggagaaaatttagcaagaagactaactagtgcagtgataaatgaaattttccaacgtcaggttaacttgatattttgtgatgaggtttcagtttcagcatgtttgcctctggaatctaaggatgttgttaaaaaggtccaaaagttggcccaaacagccagcaaagaatgtcaaacttcatcaccatatacaataatattacctcataaatttttggagaatgtgatttctgctcttttctccaaaattttctcaacaatatccagcacaaaaacaaaagaacctgaggacaatttgtccacagaactgaatttccttcaaatgaagttagtaagtgcagttgcaacagagatctcccaagataaatatatgactatacagtatgtagaaaccttacaatctgatgatgatgaaattattcaattagtggttcagtctgtttataataatctcttgccacagtttggatcacaagagattatacaaaattgtgtaaccagtggatgcaaaatcctttcagaaaacatagttgacttggttctacgagaagtggctagcaatcagctgcagagctatttttgtggagagctaactccacatcagtgtgtggaagttgaaaacatcgttgaaaagatccttaaagatgttttccaaactactgatgtgcccctacctaaaccttcacatgctgataagctgtcttataacataatagaagaaattgctgtgaaatttttatcaaagcttttatctatatttccaaaagtacataaagaaagaacaaaatctctagagactgatatgcaaaaaataacttcaaaagtactaaattcagtccaagaatttatctccaaaagtaagattaaacttgtaccacccaccaaggaatcacctactgtgcctgtagctgataatgcaactattgaaaacatagttaattctatttataccagtgttttaaagcactctggctcttatacttctgtatttaaagatttaatgggtaaaagcaatgtcctctctgatacaataggctttttaatggtgaatgcaatttcgaattctgaatttcaacctcaagtagaggaagaagtatcaaattcagaattagttctggaagctgtcaaaattatggaaaaagtgatcaaaattattgatgaacttaagtctaaggaaaagtcttcatccagaaaaggtttgacattagatgccaaacttttagaagaggtgttggccttgttcttggctaaactaataaggttgccaagttcctcaagcaaagatgaaaaaaacttatcaaagactgagttaaataaaattgcatctcaactgtcaaaattggtaacagctgaaatttccagaagtagcattagtctaatagcttctgatcctgaagagcactgtttaaatccagaaaatacagaaaggatttatcaggttgtcgattccgtttatagtaacatactgcaacaatcaggaaccaacaaagaattttattatgatataaaagatacaaatacagcctttcctaaaaaagtggctagtttaattattgatggagtttcaagttttccattagatacaattaactcaacaatttcaaatgctgatctctctggagagctagacgttaatagaattgttcaaaaggcccaagaacatgcttttaatgtgattcctgaattagagcaagaaaagttagatcaaaatttatctgaagaggaatctccaattaaaatagttccacatgttggaaaaaaaccagtcaaaatagatccaaaaattatttcagaacacttagcagttatttctataaaaactcaacctcttgagaaacttaagcaggagtgtttgaaaagaactggacatagcatagcagaactgagaagagcatcaataagtgggagaaattactccttaggatcacctgatttagaaaagagaaagacagaaagacgtacctcattggataagactggaagactggatgtaaaacccctagaggccgttgctagaaattcatttcagaatataagaaagcctgatattacaaaggtggagctcttaaaagatgttcaaagtaaaaatgatcttattgttcgattagtagctcatgatattgatcaagtgtatttggaaaattacataaaagaggaacgagattctgatgaagatgaagttgttttaacacagacttttgcaaaagaagaaggcatcaaagtatttgaagatcaagtgaaagaagtcaagaagccaatacaaagcaaactttctcctaagtcaacactaagcacgagcagcctgaaaaaatttttgtcactaagtaaatgttgtcagaccacagccagtgcaaatattgaaagtactgaagcaatctcaaatcaggtaatagaatccaaggagacacatgttaaaagagctgttgctgagcttgacatggccacaccaaagacgatgcctgaaacagcctcttcatcttgggaggaaaagccccagtgtaagaaagaagaaaagaatcttgttactgaaccaacacattacttcatacacagaattatgagttcatcttcatacaaccaagaagatctcatttcatctactggtgaggctgaagattgtcactcagacccaagtgctaaaatattagaagaaagttctcaggaacaaaagccagagcatggaaacagtgttaagtttatcaccatctttgaaagatccaaggatgttcttggcagtgcaaatccctcaaaggaagtcatttcagaaactcccaagcccgatgtctccaaacaaggatctaaaatgctgacaaaaatgtcttcaactttgtcaaaggtgttttctcaatgtaacaccaatatttccagatcttcctcaccagctcaccaggatgaacactgaagcttttgtacctgatataagtatgcttacttcttttagaaaataaaatggtttttaaagcataaaaaaaaaaaaaaaaaaaaaaaaaaaa

SEQ ID NO: 694 - DNA, 2860 bp, Homo sapiens
atgcttcactattaaaatattttccccccaagtctcaaatattgaagaatctctaaccaggctcgaaacgccggtctcagtggctattgagttacccaccaagttaccccgggacaccagtccctacgaagaccttgggcgattttgaagtgcgggcacctcgattccccgaatctgtagtgtggctggtatcggtgttcccctggtttaactagcctgtttgaaggcacagatcattcatggggatgtataaccgaaaccagtcctctccaccgcctggggatcttcactttcgcagtctacgactgcctgtgactccagaaagacaaactgcagattggccaaggtacatctcagatcagatccctctgggaaaagcgcgggaatgcttggctctagtagttaggagctctggtgagagcgcccctagtgccattttcccatccctgcccttgacagtcccctttggtctaaattcacggttctagacagtcaaagtctacctgctgggtgtccactctcaagccataggttttcaatcctaaaagggattaggaccttggctcaaaatgtggtcaacgcagtgttcaaattaggagggcagctgggagatggcagcaggggatgaaagtatgactcctacttcgtccgcaactgtgggtctggcacctcttgacttgccagtatgctggcaaacaacccatctctcttggagaatccacacttcgtttcttctaggtccagcctaaatgttacctcctccagggagcctttccagatactgcttctcctctctcccccaactccctcccacaaatgaagttttctcttctgaattccttgctggtactgtcacttatattcttttgggtagatctctgggcatgcatatgtcacctcctgtgactgtgggtttcttgacaacctaatcaatgcattgaacaaaggagatgtttagacaacccatataaaatgaataagagaaatagggtgaataccgtctaccccaattgcaatcagattagtttcctttattttgaaaacgattagaactagtagaggagttagatgtggcccactagggaacaaattttcatctccaagccgtcctctggctcgatcgggtctgcactgggtctgcatcaacttgcgctggctcagagggaggctcagccccagcctggccttcctggtgcccactcccaacatcctgagcagggccgactctaggcaccccacgattagctgagtgatctagggcaaggacctaggcgtctctaagtcttagtttccccatctgaacaatgtggataatgacacgtacctggggtgggcaggctagagtaaatgggaaaatcaaagcgccagccagagcgggtcgcactgttagttcctgtattttctcctcctgcctctggtttcttccgttccgttctagctgcctgaagacccagcccgacagcgatgcctgtcagcccgcgtcgcccaccagggcagctgctctcccaactcgcatggggggcaccaccccgcctcggtgccctagagctgagcgcagccgcggctccacggggatcgccagggcctcagccctcgcggccggcggcgcgggagtgttgcggggcagggaccagagcgcgatcagagcggccacccccgatttaggtcgccagctttccagtcactgcgatggccactggggcgccccttccatcctggttaaattctcattgtgatccccagccctcttctcggttccccacacccaggaggccggttctccgccgctcaggctgggagaggtcaccgctccgggcagggtggacccccagctccgtctcggaggacctttcgccggaggcgagcaggaaggggttaaccatgagcctcccaccctcacctcccagaccctggtgccgggctaaggcctccgcttccctcctgaggtctcattaggaaaccctcaccgctattttcaacatttcctcaatcaagtgcctttaaatagagctgcacaaacagattggcggcaaaagcgtagatcttgtcacgattgagaccaatccagtatttcagccttgtttgctttgcaattacgggttggcttgtggctacggtgccaccggggcaaatctgcagccgctcgctttctcctctgcgctccgggcgggtggaggaagcgacccgcggagtcactgcagggaggagagggggacgcgcgcggggggaggcggcggagggcggaggagactcgcttgcaccccagggccgcgggcacgcagagctgtgttgaaggacatacttttcaggttcctgacagtcactgagctatacgcaataataaagtgcgtgattcgcgtgtggaaaccagtgtcgtgtccttaccagcttccttttctgtccaccttccctctctcttctacctccgtttcgcttttcttcagtgcatgttagcggtttgctggatttcccttctccctcgctgttcaactgctagcatgatttgttacattttccacagctgtttattcttgtttgactttttgtacaaagtcactttaaatctgctgcagaaagaataaagcacctagccctttggatggactcctgcaggcgtgtggctgtccctggcccacttttaattctttggagatggctcttctgtgtaaatcagctgctgggtgcgttcggtcacctcgtaggccagcctagtttgtatcagcagaacagtagtggactcgactcaggtcgtaagccttatatttcacagacaattaaatcttggctgctgttgaacaaaactgtaatatttactttgttctataccgagaagcacttttaaagtaaaaaagaaaaaaaa

SEQ ID NO: 695 - DNA, 1599 bp, Homo sapiens
taaaatattttccccccaagtctcaaatattgaagaatctctaaccagaaggcacagatcattcatggggatgtataaccgaaaccagtcctctccaccgcctggggatcttcactttcgcagtctacgactgcctgtgactccagaaagacaaactgcagattggccaagctgcctgaagacccagcccgacagcgatgcctgtcagcccgcgtcgcccaccagggcagctgctctcccaactcgcatggggggcaccaccccgcctcggtgccctagagctgagcgcagccgcggctccacggggatcgccagggcctcagccctcgcggccggcggcgcgggagtgttgcggggcagggaccagagcgcgatcagagcggccacccccgatttaggtcgccagctttccagtcactgcgatggccactggggcgccccttccatcctggttaaattctcattgtgatccccagccctcttctcggttccccacacccaggaggccggttctccgccgctcaggctgggagaggtcaccgctccgggcagggtggacccccagctccgtctcggaggacctttcgccggaggcgagcaggaaggggttaaccatgagcctcccaccctcacctcccagaccctggtgccgggctaaggcctccgcttccctcctgaggtctcattaggaaaccctcaccgctattttcaacatttcctcaatcaagtgcctttaaatagagctgcacaaacagattggcggcaaaagcgtagatcttgtcacgattgagaccaatccagtatttcagccttgtttgctttgcaattacgggttggcttgtggctacggtgccaccggggcaaatctgcagccgctcgctttctcctctgcgctccgggcgggtggaggaagcgacccgcggagtcactgcagggaggagagggggacgcgcgcggggggaggcggcggagggcggaggagactcgcttgcaccccagggccgcgggcacgcagagctgtgttgaaggacatacttttcaggttcctgacagtcactgagctatacgcaataataaagtgcgtgattcgcgtgtggaaaccagtgtcgtgtccttaccagcttccttttctgtccaccttccctctctcttctacctccgtttcgcttttcttcagtgcatgttagcggtttgctggatttcccttctccctcgctgttcaactgctagcatgatttgttacattttccacagctgtttattcttgtttgactttttgtacaaagtcactttaaatctgctgcagaaagaataaagcacctagccctttggatggactcctgcaggcgtgtggctgtccctggcccacttttaattctttggagatggctcttctgtgtaaatcagctgctgggtgcgttcggtcacctcgtaggccagcctagtttgtatcagcagaacagtagtggactcgactcaggtcgtaagccttatatttcacagacaattaaatcttggctgctgttgaacaaaactgtaatatttactttgttctataccgagaagcacttttaaagtaaaaaagaaaaaaaaaccaaa

SEQ ID NO: 696 - DNA, 2860 bp, Homo sapiens; identical to SEQ ID NO: 694

SEQ ID NO: 697 - DNA, 1599 bp, Homo sapiens; identical to SEQ ID NO: 695

SEQ ID NO: 698 - DNA, 2429 bp, Homo sapiens
gcaagtgtttaacagatgcttcactattaaaatattttccccccaagtctcaaatattgaagaatctctaaccagggacaccagtccctacgaagaccttgggcgattttgaagtgcgggcacctcgattccccgaatctgtagtgtggctggtatcggtgttcccctggtttaactagcctgtttggcacagatcattcatggggatgtataaccgaaaccagtcctctccaccgcctggggatcttcactttcgcagtctacgactgcctgtgactccagaaagacaaactgcagattggccaaggtccagcctaaatgttacctcctccagggagcctttccagatactgcttctcctctctcccccaactccctcccacaaatgaagttttctcttctgaattccttgctggtactgtcacttatattcttttgggtagatctctgggcatgcatatgtcacctcctgtgactgtgggtttcttgacaacctaatcaatgcattgaacaaaggagatgtttagacaacccatataaaatgaataagagaaatagggtgaataccgtctaccccaattgcaatcagattagtttcctttattttgaaaacgattagaactagtagaggagttagatgtggcccactagggaacaaattttcatctccaagccgtcctctggctcgatcgggtctgcactgggtctgcatcaacttgcgctggctcagagggaggctcagccccagcctggccttcctggtgcccactcccaacatcctgagcagggccgactctaggcaccccacgattagctgagtgatctagggcaaggacctaggcgtctctaagtcttagtttccccatctgaacaatgtggataatgacacgtacctggggtgggcaggctagagtaaatgggaaaatcaaagcgccagccagagcgggtcgcactgttagttcctgtattttctcctcctgcctctggtttcttccgttccgttctagctgcctgaagacccagcccgacagcgatgcctgtcagcccgcgtcgcccaccagggcagctgctctcccaactcgcatggggggcaccaccccgcctcggtgccctagagctgagcgcagccgcggctccacggggatcgccagggcctcagccctcgcggccggcggcgcgggagtgttgcggggcagggaccagagcgcgatcagagcggccacccccgatttaggtcgccagctttccagtcactgcgatggccactggggcgccccttccatcctggttaaattctcattgtgatccccagccctcttctcggttccccacacccaggaggccggttctccgccgctcaggctgggagaggtcaccgctccgggcagggtggacccccagctccgtctcggaggacctttcgccggaggcgagcaggaaggggttaaccatgagcctcccaccctcacctcccagaccctggtgccgggctaaggcctccgcttccctcctgaggtctcattaggaaaccctcaccgctattttcaacatttcctcaatcaagtgcctttaaatagagctgcacaaacagattggcggcaaaagcgtagatcttgtcacgattgagaccaatccagtatttcagccttgtttgctttgcaattacgggttggcttgtggctacggtgccaccggggcaaatctgcagccgctcgctttctcctctgcgctccgggcgggtggaggaagcgacccgcggagtcactgcagggaggagagggggacgcgcgcggggggaggcggcggagggcggaggagactcgcttgcaccccagggccgcgggcacgcagagctgtgttgaaggacatacttttcaggttcctgacagtcactgagctatacgcaataataaagtgcgtgattcgcgtgtggaaaccagtgtcgtgtccttaccagcttccttttctgtccaccttccctctctcttctacctccgtttcgcttttcttcagtgcatgttagcggtttgctggatttcccttctccctcgctgttcaactgctagcatgatttgttacattttccacagctgtttattcttgtttgactttttgtacaaagtcactttaaatctgctgcagaaagaataaagcacctagccctttggatggactcctgcaggcgtgtggctgtccctggcccacttttaattctttggagatggctcttctgtgtaaatcagctgctgggtgcgttcggtcacctcgtaggccagcctagtttgtatcagcagaacagtagtggactcgactcaggtcgtaagccttatatttcacagacaattaaatcttggctgctgttgaacaaaactgtaatatttactttgttctataccgagaagcacttttaaagtaaaaaagaaaaaaaa

SEQ ID NO: 699 - DNA, 2408 bp, Homo sapiens
atggtccggaatcccgcaacaattgcccttccgggacggctttttctttttaagggggacttggttccttttaacaaagggctttcccccattcggaagcagttggcaaaggggcggggtgacgcggtgacgcaatccgcctgcgcgctgggcggggcggggcgggctggggcgggctgtgagcggaccgcgagcgctgggcgggtccgcggcgcggtcggtcggcgcctattctcgggctgtttggcgggtgagtgtctcgccggtgtaccccgcacaagttgtgggccggccctcccgaggagctgcgggggacgcgccgctcgtcccatactctcgggcggtggtcggctggctctggggtgccggcggggcggtgtgggggaggggcggccgagcccaggctcttcggcacttatcgtgggctcccccgtcccgggcggtcctagtgccggcgacagtggctccgacacgggcaggcccgggcgcgggagtggggattccggtgaccccttgttgaccctgcgggaattcctctgcactgtcgtcggtgctgggcctcggggcgtcgagtgcggtcgaggtcgggaggtttggtgcttggagggaggatacaggtttaggcccgacaaacacttagagcttgtgtggccatcttgtctttctaacggtgccatttcctccctgaggcgtggaggactggccagcccccaaacctccaagcccatcggctggatgccgtggataagcgaggggagagcgactaggccctgtctgcgggtaccttcggcgaggagaggcgacgaaggtctgcaccagcgaggcacggacaggcagcagggggtagggtatagggttggaggccgccgagttggcccggggatgaggagcaaacctgtggcttccgtggtctcagtggagtcccaactgtgacctggcctactggcccagacaaacctggcttgcttttttaccttttcggtctaattcttgtcagtgccaccagaccttgtcctctctccacggaaacacacgaaccaactacactgaacttcttgtagttcaaacttctgcacctttggccattgcccaaactcttaaatctggctacttcccaccttaactgccttctccttacctagtctgtgcttgtgggattccgcccaaattagatttcctccagacaggcttaggtgtttacctgatgttccagatggtatttgtccagtggactattggtgctgtgagggcagggcacatgttgtcacccatactcattgcctcggttggtgtctagcacctagtaggttctcaaatactttttgaatcacagtgcctgccgatatatttaatgtttcaaaatagttctgccgtcataaagaaaaacatcatggtgtaggggtcatgaaagctgattcttgatacttctgatttgagcctcattgttttcagtgatttttgatagctcccattaatgggttctttgcaccacccagcatcctaactcatgatgtgtactgttatgtataatcttggcattgatctcattagctataaaggttgtcctgattttttttcctcaacttccaccttgatttctctcaccagtgccacagccaggaataaagaacaagagcgttttaattagatcagatttacattctgactggctcttaaactagcaaggtgacctagggaaaggggccagggtttccctctatcattcataaatgtaattcagggcccctttttatccccaataccagcatacagaaactgctgtaaaagaagaagttgtgggtatttttttttttttttttgtctggaggaatggggacaccaaaactcatttggcagcagaggtgaggtaaggccatttgtattgtctgttctgttagtagtcatacatgccacttatccctgccccagtccctgttaggagtgttatgtgggtatactgaacgtggaccttccccgaatccaaagaatccagatgctttgaataagatcatggaccttccgggttctacatcgccagatgttgttcatcttctatcttttgttttgcgaaaattggttttttatgtgtattggggttattctgtggaagaaataagctgtgggtcaagattaaagaactttaaacaacttctggcatgtggaataaacacgatctgaaggaacaaaattttcatttgactacatttttggtccaatttgcacccagtgtttaagttaatcacagtgcttggcagtttgtgttgctggatcaaggctttctcactgaaaaccatgtgcttcagaggttcataattcctctttcaccttccatttcacattagttaataaattatgagagaaaacattgtggatccaagttatgtttcagaaaaaaaaaaacaggaaaa

SEQ ID NO: 700 - DNA, 2861 bp, Homo sapiens
atgccacggtgtcagaaaggctcaggttcccaacaccatgcgggtcagccattaggaactcaggaagtgtttcctctaagcgggggaaacctaggaaggcttcctgaacgaggggtatttgcgccaagccttgacgtgagtctcgaacagttgcagtgcctccaggccacgcgggagggaggaaaggacaccccgggccggggcacaacccgcgggccggagccgcccgcgcccatcccgctcaggccgcagccaggcacggcaccctcccgtccccgagccacgtcgctgctcgtgggctcgcggagcactccccaggtctcacctcgggccccacaccagaaggagaaagctaggggccgcgccagctccgccctcccccgcggggcggcgggccccagcccgggcacaggaaggccacgtccccggggagggacgcccgactcgatggtctgcgcagggcccgtcggccccacttacccaccgcaaggcgaagattctcattacctgttccactcttataagcataagaaaaccgagctcataaggaagcagttggcaaaggggcggggtgacgcggtgacgcaatccgcctgcgcgctgggcggggcggggcgggctggggcgggctgtgagcggaccgcgagcgctgggcgggtccgcggcgcggtcggtcggcgcctgttctcgggctgtttggcgggtgagtgtctcgccggtgtaccccgcacaagttgtgggccggccctcccgaggagctgcgggggacgcgccgctcgtcccatactctcgggcggtggtcggctggctctggggtgccggcggggcggtgtgggggaggggcggccgagcccaggctcttcggcacttatcgtgggctcccccgtcccgggcggtcctagtgccggcgacagtggctccgacacgggcaggcccgggcgcgggagtggggattccggtgaccccttgttgaccctgcgggaattcctctgcactgtcgtcggtgctgggcctcggggcgtcgagtgcggtcgaggtcgggaggtttggtgcttggagggaggatacaggtttaggcccgacaaacacttagagcttgtgtggccatcttgtctttctaacggtgccatttcctccctgaggcgtggaggactggccagcccccaaacctccaagcccatcggctggatgccgtggataagcgaggggagagcgactaggccctgtctgcgggtaccttcggcgaggagaggcgacgaaggtctgcaccagcgaggcacggacaggcagcagggggtagggtatagggttggaggccgccgagttggcccggggatgaggagcaaacctgtggcttccgtggtctcagtggagtcccaactgtgacctggcctactggcccagacaaacctggcttgcttttttaccttttcggtctaattcttgtcagtgccaccagaccttgtcctctctccacggaaacacacgaaccaactacactgaacttcttgtagttcaaacttctgcacctttggccattgcccaaactcttaaatctggctacttcccaccttaactgccttctccttacctagtctgtgcttgtgggattccgcccaaattagatttcctccagacaggcttaggtgtttacctgatgttccagatggtatttgtccagtggactattggtgctgtgagggcagggcacatgttgtcacccatactcattgcctcggttggtgtctagcacctagtaggttctcaaatactttttgaatcacagtgcctgccgatatatttaatgtttcaaaatagttctgccgtcataaagaaaaacatcatggtgtaggggtcatgaaagctgattcttgatacttctgatttgagcctcattgttttcagtgatttttgatagctcccattaatgggttctttgcaccacccagcatcctaactcatgatgtgtactgttatgtataatcttggcattgatctcattagctataaaggttgtcctgattttttttcctcaacttccaccttgatttctctcaccagtgccacagccaggaataaagaacaagagcgttttaattagatcagatttacattctgactggctcttaaactagcaaggtgacctagggaaaggggccagggtttccctctatcattcataaatgtaattcagggcccctttttatccccaataccagcatacagaaactgctgtaaaagaagaagttgtgggtatttttttttttttttttgtctggaggaatggggacaccaaaactcatttggcagcagaggtgaggtaaggccatttgtattgtctgttctgttagtagtcatacatgccacttatccctgccccagtccctgttaggagtgttatgtgggtatactgaacgtggaccttccccgaatccaaagaatccagatgctttgaataagatcatggaccttccgggttctacatcgccagatgttgttcatcttctatcttttgttttgcgaaaattggttttttatgtgtattggggttattctgtggaagaaataagctgtgggtcaagattaaagaactttaaacaacttctggcatgtggaataaacacgatctgaaggaacaaaattttcatttgactacatttttggtccaatttgcacccagtgtttaagttaatcacagtgcttggcagtttgtgttgctggatcaaggctttctcactgaaaaccatgtgcttcagaggttcataattcctctttcaccttccatttcacattagttaataaattatgagagaaaacattgtggatccaagttatgtttcagaaaaaaaaaaacaggaaaa

SEQ ID NO: 701 - DNA, 4552 bp, Homo sapiens
tgaggcagcatggaggagaggaagcatgagaccatgaacccagctcatgtcctctttgaccggtttgtccaggccaccacctgcaagggaaccctcaaggctttccaggagctctgtgaccacctggaactaaagccaaaggactaccgctccttctatcacaagctcaagtccaagcttaactactggaaagccaaagccctctgggcaaaattggacaaacggggcagtcacaaagactacaaaaagggaaaagcgtgcactaacaccaagtgtctcatcattggggctggcccctgtggtctccgtacagccatcgacttatccttactgggggccaaggtggttgttattgagaaacgagatgccttctcccgcaacaacgtcttgcatctctggccattcaccatacatgatctacgaggtctgggtgccaagaagttctatggcaagttctgtgctggagccatcgaccatatcagtatccgtcagctccaactaatacttttgaaagtagccttgatcctaggcattgaaatccacgtcaatgtggaattccaaggacttatacagcctcctgaggaccaagagaatgaacggataggctggcgggcactggtgcaccccaagactcatcctgtgtcagagtatgaatttgaagtgatcatcggtggggatggtcggaggaacaccttggaagggtttcgtcggaaagaattccgtggcaaactggccatcgccatcacggcaaattttatcaaccgaaatacaacagcagaagctaaagtggaagagatcagtggtgtggcttttatattcaaccaaaaatttttccaggaactgagggaagccacaggtattgacttggagaacatcgtttactacaaagatgacacacactatttcgttatgacagccaaaaagcagagtttgctggacaaaggagtgatactacatgactacgccgacacagagctcctgctttcccgagaaaacgtggaccaggaggctctgctcagctatgccagggaggcggcagacttctctacccagcagcagctgccgtctctggattttgccatcaatcactatgggcagcccgatgtggccatgtttgacttcacttgtatgtatgcctccgagaacgccgccttggtgcgggagcagaacggacaccagttactagtggctctggtcggggacagcctcctagagcctttctggccaatgggaacaggaatagcccggggctttctagctgctatggactctgcctggatggtccgaagttggtctctaggaacgagccctttggaagtgctggcagagagggaaagtatttacaggttgctgcctcagaccacccctgagaatgtgagtaagaacttcagccagtacagtatcgaccctgtcactcggtatcccaatatcaacgtcaacttcctccggccaagccaggtgcgccatttatatgatactggcgaaacaaaagatattcacctggaaatggagagcctggtgaattcccgaaccacccccaaattgactcgcaatgagtctgtagctcgttcaagcaaactgctgggttggtgccagaggcagacagatggctatgcaggggtaaacgtgacagatctcaccatgtcctggaaaagtggcttggccctttgtgcaattatccatagataccgccctgacctgatagattttgattctttggatgagcaaaatgtggagaagaataaccaactggcctttgacattgctgagaaggaattgggcatttctcccatcatgacaggcaaagaaatggcctccgtgggggagcctgataagctgtccatggtgatgtacctgactcagttctacgagatgtttaaggactccctcccctctagcgacaccttggacctaaatgccgaggagaaagcagtcctgatagccagcaccagatcccctatctccttcctaagcaaacttggccagaccatctctcggaagcgttctcccaaggataaaaaggaaaaggacttggatggtgctgggaagaggagaaagaccagtcaatcagaggaggaggaagctcctcggggccacagaggagaaagaccgaccctggtgagcactctgacagacaggaggatggacgttgccgttgggaaccagaacaaagtgaagtacatggcgacccagctgctggccaaatttgaagagaatgcgcccgcacagtccatcggcatacggagacagggctccatgaagaaggagttcccgcagaacctgggaggcagcgacacatgctacttctgccagaagcgggtctacgtgatggagaggctgagtgccgagggcaagttcttccaccggagctgcttcaagtgcgagtactgcgccaccaccctgcgcctctcggcctacgcctacgacatcgaggatggtaaattctactgtaagccacactactgctatcgactctctggctacgcacaaaggaagagaccggcagtggctcccctgtctggaaaggaggccaaaggacccctgcaggatggcgccaccacagatgcaaacggacgggccaacgccgtggccagctccactgagagaaccccaggttcaggcgtgaacggcctggaggagcccagcatcgccaagcgactgaggggcaccccagagcggatcgagctggagaactaccgcctgtccctgaggcaggctgaggcactgcaggaggtaccggaggagactcaggccgagcacaacctgagcagcgtgctggacacgggcgccgaggaggacgtcgccagcaggtcagcacgcagggctgcagggcgcccacccgccacacggccctaagagcctcctcacctctgtgtgtctcggtttcttctcagtgaagggaggcctcctgtctttcctgctgcccgcagtccattctccccagtcccttttaggttcttagcctcatcttctagtcagtgaggactcctccatcagactcaattcagagattcaggaagtatttattccttgaggacctgacatgtccccagctccaagtctgtcattgggaaggaaagtggcaggctctgcccccgggttattcacagattcagcagagggaaggacgggcacacggggagggactctgggtgattcagccaccagtgcaccgggccgtcttgagggaggcctagtccgtcccccaggcatctttttttctcctgtaggtaaagaaagggactgaaaatgtgtgccccaggggccgcatgcagcaccagtggatgcatgcttaggcagttccagagctgtaatcacatccagctgggtgacacctttggggatgtgcatgctataaccctaggactccctatatccactgccctgcaccccagggcttccagtatcagcgaaggcttcaaagtgttcagccgattacagatgatcaagagagccaagaatcaaaagggggtccggtgtcctgtggggcttcaggacagaaacacaggctgcaaacccgaggggcagaggcctcaagtggccttggagagcatttgaatcacacaccttgatttagccatgatgaagggaacatgtggggataaggagagcagagcagtttttttaaggtccaagaacgctttccagaaggtgtttgctgggccgagctgctttcagctgcacccgccacctcagccctcatgtcagacaccctctgcctagattcattcttgggctgcctcacagaccgctcctccgtgcatgccgggggcagcctctgccttggtgtctgcagttccaaagctgtcactgatggtgcatcctcatccagaactctgcttccctatccagagcacccatggaggccccactctccccactgtgcccagatgagggggagcccactctctctctccactgaccctgcagtgagggtgagagatgctgtgtgtcaaaacacatttataaacccttgagcagagctactggcttgaccttgggctgagtgtgggtcagcaccattttctccactgtaatttataaattgtgagaggcagtggggcagcaagttcatgtaatgtagcaaggacattccaggaaggctaacccctggcatttatggcaggtatgacaggagggcagcacagaaaacatgaaatcagtcagcatctatgcaatgcaatacatgcctcatcttactcagattgaagttaaaaaaagattttaaaactagcattcatgctgggcgcagtggctcatgcctgtaatcccagcactttgggaggccaaggtgggcacatcacttaaggtcaggagttcaagaccagcctggccaacataatgaaaccctgtctctactaaaaatacaaaaattagctgggcatggtggtgcacacctgtaatcccagctacttgggagggtaaggcatgagaattgcttgaacctgggaggcggaggttgcagcgagccgagatcatgccactgcaccactgcactccagcctgtgtgacagaatgagactccatctcaaaaaaaattaaaattaaaatc

SEQ ID NO: 702 - DNA, 4878 bp, Homo sapiens
ccggctgctacctaccgcgccggacgctcgggctgcggaacagggcggcactggcccgccacagcgacgccggcgccgagggacaccgcagtatgaggcagagattaacgtgacagtgtcaggtggacccacagccatcccacctccccctctggggagtgctgagagtgaggcagcatggaggagaggaagcatgagaccatgaacccagctcatgtcctctttgaccggtttgtccaggccaccacctgcaagggaaccctcaaggctttccaggagctctgtgaccacctggaactaaagccaaaggactaccgctccttctatcacaagctcaagtccaagcttaactactggaaagccaaagccctctgggcaaaattggacaaacggggcagtcacaaagactacaaaaagggaaaagcgtgcactaacaccaagtgtctcatcattggggctggcccctgtggtctccgtacagccatcgacttatccttactgggggccaaggtggttgttattgagaaacgagatgccttctcccgcaacaacgtcttgcatctctggccattcaccatacatgatctacgaggtctgggtgccaagaagttctatggcaagttctgtgctggagccatcgaccatatcagtatccgtcagctccaactaatacttttgaaagtagccttgatcctaggcattgaaatccacgtcaatgtggaattccaaggacttatacagcctcctgaggaccaagagaatgaacggataggctggcgggcactggtgcaccccaagactcatcctgtgtcagagtatgaatttgaagtgatcatcggtggggatggtcggaggaacaccttggaagggtttcgtcggaaagaattccgtggcaaactggccatcgccatcacggcaaattttatcaaccgaaatacaacagcagaagctaaagtggaagagatcagtggtgtggcttttatattcaaccaaaaatttttccaggaactgagggaagccacaggactacgccgacacagagctcctgctttcccgagaaaacgtggaccaggaggctctgctcagctatgccagggaggcggcagacttctctacccagcagcagctgccgtctctggattttgccatcaatcactatgggcagcccgatgtggccatgtttgacttcacttgtatgtatgcctccgagaacgccgccttggtgcgggagcagaacggacaccagttactagtggctctggtcggggacagcctcctagagcctttctggccaatgggaacaggaatagcccggggctttctagctgctatggactctgcctggatggtccgaagttggtctctaggaacgagccctttggaagtgctggcagagagggaaagtatttacaggttgctgcctcagaccacccctgagaatgtgagtaagaacttcagccagtacagtatcgaccctgtcactcggtatcccaatatcaacgtcaacttcctccggccaagccaggtgcgccatttatatgatactggcgaaacaaaagatattcacctggaaatggagagcctggtgaattcccgaaccacccccaaattgactcgcaatgagtctgtagctcgttcaagcaaactgctgggttggtgccagaggcagacagatggctatgcaggggtaaacgtgacagatctcaccatgtcctggaaaagtggcttggccctttgtgcaattatccatagataccgccctgacctgatagattttgattctttggatgagcaaaatgtggagaagaataaccaactggcctttgacattgctgagaaggaattgggcatttctcccatcatgacaggcaaagaaatggcctccgtgggggagcctgataagctgtccatggtgatgtacctgactcagttctacgagatgtttaaggactccctcccctctagcgacaccttggacctaaatgccgaggagaaagcagtcctgatagccagcaccagatcccctatctccttcctaagcaaacttggccagaccatctctcggaagcgttctcccaaggataaaaaggaaaaggacttggatggtgctgggaagaggagaaagaccagtcaatcagaggaggaggaagctcctcggggccacagaggagaaagaccgaccctggtgagcactctgacagacaggaggatggacgttgccgttgggaaccagaacaaagtgaagtacatggcgacccagctgctggccaaatttgaagagaatgcgcccgcacagtccatcggcatacggagacagggctccatgaagaaggagttcccgcagaacctgggaggcagcgacacatgctacttctgccagaagcgggtctacgtgatggagaggctgagtgccgagggcaagttcttccaccggagctgcttcaagtgcgagtactgcgccaccaccctgcgcctctcggcctacgcctacgacatcgaggatggtaaattctactgtaagccacactactgctatcgactctctggctacgcacaaaggaagagaccggcagtggctcccctgtctggaaaggaggccaaaggacccctgcaggatggcgccaccacagatgcaaacggacgggccaacgccgtggccagctccactgagagaaccccaggttcaggcgtgaacggcctggaggagcccagcatcgccaagcgactgaggggcaccccagagcggatcgagctggagaactaccgcctgtccctgaggcaggctgaggcactgcaggaggtaccggaggagactcaggccgagcacaacctgagcagcgtgctggacacgggcgccgaggaggacgtcgccagcaggtcagcacgcagggctgcagggcgcccacccgccacacggccctaagagcctcctcacctctgtgtgtctcggtttcttctcagtgaagggaggcctcctgtctttcctgctgcccgcagtccattctccccagtcccttttaggttcttagcctcatcttctagtcagtgaggactcctccatcagactcaattcagagattcaggaagtatttattccttgaggacctgacatgtccccagctccaagtctgtcattgggaaggaaagtggcaggctctgcccccgggttattcacagattcagcagagggaaggacgggcacacggggagggactctgggtgattcagccaccagtgcaccgggccgtcttgagggaggcctagtccgtcccccaggcatctttttttctcctgtaggtaaagaaagggactgaaaatgtgtgccccaggggccgcatgcagcaccagtggatgcatgcttaggcagttccagagctgtaatcacatccagctgggtgacacctttggggatgtgcatgctataaccctaggactccctatatccactgccctgcaccccagggcttccagtatcagcgaaggcttcaaagtgttcagccgattacagatgatcaagagagccaagaatcaaaagggggtccggtgtcctgtggggcttcaggacagaaacacaggctgcaaacccgaggggcagaggcctcaagtggccttggagagcatttgaatcacacaccttgatttagccatgatgaagggaacatgtggggataaggagagcagagcagtttttttaaggtccaagaacgctttccagaaggtgtttgctgggccgagctgctttcagctgcacccgccacctcagccctcatgtcagacaccctctgcctagattcattcttgggctgcctcacagaccgctcctccgtgcatgccgggggcagcctctgccttggtgtctgcagttccaaagctgtcactgatggtgcatcctcatccagaactctgcttccctatccagagcacccatggaggccccactctccccactgtgcccagatgagggggagcccactctctctctccactgaccctgcagtgagggtgagagatgctgtgtgtcaaaacacatttataaacccttgagcagagctactggcttgaccttgggctgagtgtgggtcagcaccattttctccactgtaatttataaattgtgagaggcagtggggcagcaagttcatgtaatgtagcaaggacattccaggaaggctaacccctggcatttatggcaggtatgacaggagggcagcacagaaaacatgaaatcagtcagcatctatgcaatgcaatacatgcctcatcttactcagattgaagttaaaaaaagattttaaaactagcattcatgctgggcgcagtggctcatgcctgtaatcccagcactttgggaggccaaggtgggcacatcacttaaggtcaggagttcaagaccagcctggccaacataatgaaaccctgtctctactaaaaatacaaaaacttgccaggtgtggtggcacgcacctgtaatcccagctactcaggaggctgaggcaggagaatcgcttgaacccaggaggcagaggttgccgtcagccagattgtgccactgcactccagcctgggcaacagagggagacttcgtctcaaaaaaaaaaaaaaaaatgaagagcccggcctggtgcggtagctcatgcctgtaatcccagtactccgggaggccaaagcaggcagatcacctgagcccaggagtttgagagcagcagtaacatgatgaaaccccgtctctacaaaaaatatgaaaattatccggacctgcctgtaatcccaactactcaggaggctgaggcaggagaaccacttgaaccagggaggcagaagttacagtgagccaggatcatgccattgcaatccagcctgtgagacagagcaagaccc

SEQ ID NO: 703 - DNA, 4552 bp, Homo sapiens; identical to SEQ ID NO: 701

SEQ ID NO: 704 - DNA, 4744 bp, Homo sapiens
gagaggaagcatgagaccatgaacccagctcatgtcctctttgaccggtttgtccaggccaccacctgcaagggaaccctcaaggctttccaggagctctgtgaccacctggaactaaagccaaaggactaccgctccttctatcacaagctcaagtccaagcttaactactggaaagccaaagccctctgggcaaaattggacaaacggggcagtcacaaagactacaaaaagggaaaagcgtgcactaacaccaagtgtctcatcattggggctggcccctgtggtctccgtacagccatcgacttatccttactgggggccaaggtggttgttattgagaaacgagatgccttctcccgcaacaacgtcttgcatctctggccattcaccatacatgatctacgaggtctgggtgccaagaagttctatggcaagttctgtgctggagccatcgaccatatcagtatccgtcagctccaactaatacttttgaaagtagccttgatcctaggcattgaaatccacgtcaatgtggaattccaaggacttatacagcctcctgaggaccaagagaatgaacggataggctggcgggcactggtgcaccccaagactcatcctgtgtcagagtatgaatttgaagtgatcatcggtggggatggtcggaggaacaccttggaagggtttcgtcggaaagaattccgtggcaaactggccatcgccatcacggcaaattttatcaaccgaaatacaacagcagaagctaaagtggaagagatcagtggtgtggcttttatattcaaccaaaaatttttccaggaactgagggaagccacaggtattgacttggagaacatcgtttactacaaagatgacacacactatttcgttatgacagccaaaaagcagagtttgctggacaaaggagtgatactacatgactacgccgacacagagctcctgctttcccgagaaaacgtggaccaggaggctctgctcagctatgccagggaggcggcagacttctctacccagcagcagctgccgtctctggattttgccatcaatcactatgggcagcccgatgtggccatgtttgacttcacttgtatgtatgcctccgagaacgccgccttggtgcgggagcagaacggacaccagttactagtggctctggtcggggacagcctcctagagcctttctggccaatgggaacaggaatagcccggggctttctagctgctatggactctgcctggatggtccgaagttggtctctaggaacgagccctttggaagtgctggcagagagggaaagtatttacaggttgctgcctcagaccacccctgagaatgtgagtaagaacttcagccagtacagtatcgaccctgtcactcggtatcccaatatcaacgtcaacttcctccggccaagccaggtgcgccatttatatgatactggcgaaacaaaagatattcacctggaaatggagagcctggtgaattcccgaaccacccccaaattgactcgcaatgagtctgtagctcgttcaagcaaactgctgggttggtgccagaggcagacagatggctatgcaggggtaaacgtgacagatctcaccatgtcctggaaaagtggcttggccctttgtgcaattatccatagataccgccctgacctgatagattttgattctttggatgagcaaaatgtggagaagaataaccaactggcctttgacattgctgagaaggaattgggcatttctcccatcatgacaggcaaagaaatggcctccgtgggggagcctgataagctgtccatggtgatgtacctgactcagttctacgagatgtttaaggactccctcccctctagcgacaccttggacctaaatgccgaggagaaagcagtcctgatagccagcaccagatcccctatctccttcctaagcaaacttggccagaccatctctcggaagcgttctcccaaggataaaaaggaaaaggacttggatggtgctgggaagaggagaaagaccagtcaatcagaggaggaggaagctcctcggggccacagaggagaaagaccgaccctggtgagcactctgacagacaggaggatggacgttgccgttgggaaccagaacaaagtgaagtacatggcgacccagctgctggccaaatttgaagagaatgcgcccgcacagtccatcggcatacggagacagctgacacaagagcgtggggccagccagccgtcctgctgcctgcctgggcaggttcgccctgcccccaccccccggtggaaacagggctccatgaagaaggagttcccgcagaacctgggaggcagcgacacatgctacttctgccagaagcgggtctacgtgatggagaggctgagtgccgagggcaagttcttccaccggagctgcttcaagtgcgagtactgcgccaccaccctgcgcctctcggcctacgcctacgacatcgaggatggtaaattctactgtaagccacactactgctatcgactctctggctacgcacaaaggaagagaccggcagtggctcccctgtctggaaaggaggccaaaggacccctgcaggatggcgccaccacagatgcaaacggacgggccaacgccgtggccagctccactgagagaaccccaggttcaggcgtgaacggcctggaggagcccagcatcgccaagcgactgaggggcaccccagagcggatcgagctggagaactaccgcctgtccctgaggcaggctgaggcactgcaggaggtaccggaggagactcaggccgagcacaacctgagcagcgtgctggacacgggcgccgaggaggacgtcgccagcaggtcagcacgcagggctgcagggcgcccacccgccacacggccctaagagcctcctcacctctgtgtgtctcggtttcttctcagtgaagggaggcctcctgtctttcctgctgcccgcagtccattctccccagtcccttttaggttcttagcctcatcttctagtcagtgaggactcctccatcagactcaattcagagattcaggaagtatttattccttgaggacctgacatgtccccagctccaagtctgtcattgggaaggaaagtggcaggctctgcccccgggttattcacagattcagcagagggaaggacgggcacacggggagggactctgggtgattcagccaccagtgcaccgggccgtcttgagggaggcctagtccgtcccccaggcatctttttttctcctgtaggtaaagaaagggactgaaaatgtgtgccccaggggccgcatgcagcaccagtggatgcatgcttaggcagttccagagctgtaatcacatccagctgggtgacacctttggggatgtgcatgctataaccctaggactccctatatccactgccctgcaccccagggcttccagtatcagcgaaggcttcaaagtgttcagccgattacagatgatcaagagagccaagaatcaaaagggggtccggtgtcctgtggggcttcaggacagaaacacaggctgcaaacccgaggggcagaggcctcaagtggccttggagagcatttgaatcacacaccttgatttagccatgatgaagggaacatgtggggataaggagagcagagcagtttttttaaggtccaagaacgctttccagaaggtgtttgctgggccgagctgctttcagctgcacccgccacctcagccctcatgtcagacaccctctgcctagattcattcttgggctgcctcacagaccgctcctccgtgcatgccgggggcagcctctgccttggtgtctgcagttccaaagctgtcactgatggtgcatcctcatccagaactctgcttccctatccagagcacccatggaggccccactctccccactgtgcccagatgagggggagcccactctctctctccactgaccctgcagtgagggtgagagatgctgtgtgtcaaaacacatttataaacccttgagcagagctactggcttgaccttgggctgagtgtgggtcagcaccattttctccactgtaatttataaattgtgagaggcagtggggcagcaagttcatgtaatgtagcaaggacattccaggaaggctaacccctggcatttatggcaggtatgacaggagggcagcacagaaaacatgaaatcagtcagcatctatgcaatgcaatacatgcctcatcttactcagattgaagttaaaaaaagattttaaaactagcattcatgctgggcgcagtggctcatgcctgtaatcccagcactttgggaggccaaggtgggcacatcacttaaggtcaggagttcaagaccagcctggccaacataatgaaaccctgtctctactaaaaatacaaaaattagctgggcatggtggtgcacacctgtaatcccagctacttgggagggtaaggcatgagaattgcttgaacctgggaggcggaggttgcagcgagccgagatcatgccactgcaccactgcactccagcctgtgtgacagaatgagactccatctcaaaaaaaattaaaattaaaatcaaaaaataaaataaaggccaggcacggtggctcacacaggagaatcacttgaacctgggaggcggaggttgcagtgatctgagatcacaccagtacactccagcctgggagatggtgagactc

SEQ ID NO: 705 - DNA, 4744 bp, Homo sapiens; identical to SEQ ID NO: 704

SEQ ID NO: 706 - DNA, 2365 bp, Homo sapiens
atttacagctggaagggcagacggaggcatcttggtgtatacacagccctgctgggccacatcccgggtctcctccctctgcgatgccatagcaggggcgccttccgaaagccctctggattgaggcagcaggatctatggtggaacctgccccggcgtcgccaacgcccctaggaccccagcacactgactggggagcatccctgtgtcgtttctgcccggagaggagcagaggccaggctgctgctctgggagatgagactttctggtgcacctgcacttccacatgagacttccgggtgcacctgcactcccagatgcagacttcctggtgcacctgcacttcctggtgcagacttcttggttcatctgcaacttcctggtgagaatcccttgggcatctgcacttcctgatgcacctgcacttctagttattttagagaaaacgttccctgaacatgccacatgcagaggatgctgggtatcaggctacctttgctggacagctccaggtaactgcatttgctctgccaatgttggctttttaaaaatagaaaacacatatagacaaatccatcacacacacatgcacagacacacacacacacacacagacaaatccatcacacacacatgcacagacacacacacacagagtcagcgacataggctcacaagtagagctcttcgtctgtttatacttaatgcaattactgatacatctaagtttggagctgctgttttcttttacgtatactgtttgtttgcagattctgtgtataaattctttcctttcttgccgccttttagatgatttcccccagcttaccttgaggactttcgagcaaacagacacgttgaaagaatagacaaggaccacttgcatgcccctcagttagattcaccaactgtcaatattttgcactgtatgtatacacgtacatgtctgtgtatacacatatacacatacagtcacacatcgcccgatggcagggatggttctgaggaaggcgctgttaggcgatttcgtcgctgtgcgagcatcatagtgtgaacttactcaaacctagatggcacagactcatcgcctcccacacgcctgggctgtatggcaggacctcctgctaccgggctacaaacccaggcagggtggtactgtactgaatggtgcaggtgattgtaacacaatggtaagtatttgtgcatgtaaacatacctaaacatagaaacagtgtagtaaaaatatggtataaaagatcaaatacagtacacctgtacaaggtctgctctgttctaatcttatggggccaccactgtatatgccgtctattcttgacagaagtgctttatgtggcacatgactgtacatggaaatacacacacactcacacacatccacacacaagcatatgcatacacacatatatacatgtatatacacgtgcatataacatatgtagatatctgccaattgctatccaacgtgaattccataaatttacactcctaccagcagcatttgggtatctgaggtgtcacacatccttgccagcactggatattatcccggcttggagattttgccagcctggtgggtgtgaagtggatcttgttgtggttttaatttccatttctctaattatgcagaggctgagtgccaggcttcctctcctgggaagagcctgccggcttgcgggctgtcagcactcactgtgggtgcgggtggcgtgcctgcctgcacggcccttgcctctcttagtctacagggtctccactcctgagttcccggaaacaagatacagatttcagaatggcacctgaacattgtttactgatttccggctggaagtgagggtccgagggattcttctatggaattgtatgactcagcatctttctgattgcaagcagcagcatcgcagcctaaatgaatctattggctttgcttagggttggttccccttcattcttgagctggttgtgggcaactcctgccccctgtggggggactggactgccttagatcacatgtgtgtccctgactctctgtggtcaggggatagaatattcagattggaggggagccagcttctcctaaaccacgtggatctccaaacggaagtcagagcagatgggaagggggagcagacgttgagctcaatcaataaacacccaccttgggagctgcagcctggagggcttggtgactgccacgctggctgctcagagctcctcgcttacttttgggcatatgcctgtgaaccagatggtggcacctcctgaaaatcgggtctgtggataatgggaggattttttaaattatgaaaatgttcattatggaagaataaatgaagaatagcatatg

SEQ ID NO: 707 - DNA, 2257 bp, Homo sapiens
ataggcagaggccaccctccccgcctccccgcccgctgcgcgcccgccccgccccggctcactttaaaagtttactcgggccgggacgcagggcaaagcgagccatggctgtctacgtcgggatgctgcgcctggggaggctgtgcgccgggagctcgggggtgctgggggcccgggccgccctctctcggagttggcaggaagccaggttgcagggtgtccgcttcctcagttccagagaggtggatcgcatggtctccacgcccatcggaggcctcagctacgttcaggggtgcaccaaaaagcatcttaacagcaagactgtgggccagtgcctggagaccacagcacagagggtcccagaacgagaggccttggtcgtcctccatgaagacgtcaggttgacctttgcccaactcaaggaggaggtggacaaagctgcttctggcctcctgagcattggcctctgcaaaggtgaccggctgggcatgtggggacctaactcctatgcatgggtgctcatgcagttggccaccgcccaggcgggcatcattctggtgtctgtgaacccagcctaccaggctatggaactggagtatgtcctcaagaaggtgggctgcaaggcccttgtgttccccaagcaattcaagacccagcaatactacaacgtcctgaagcagatctgtccagaagtggagaatgcccagccaggggccttgaagagtcagaggctcccagatctgaccacagtcatctcggtggatgcccctttgccggggaccctgctcctggatgaagtggtggcggctggcagcacacggcagcatctggaccagctccaatacaaccagcagttcctgtcctgccatgaccccatcaacatccagttcacctcggggacaacaggcagccccaagggggccaccctctcccactacaacattgtcaacaactccaacattttaggagagcgcctgaaactgcatgagaagacaccagagcagttgcggatgatcctgcccaaccccctgtaccattgcctgggttccgtggcaggcacaatgatgtgtctgatgtacggtgccaccctcatcctggcctctcccatcttcaatggcaagaaggcactggaggccatcagcagagagagaggcaccttcctgtatggtacccccacgatgttcgtggacattctgaaccagccagacttctccagttatgacatctcgaccatgtgtggaggtgtcattgctgggtcccctgcacctccagagttgatccgagccatcatcaacaagataaatatgaaggacctggtggttgcttatggaaccacagagaacagtcccgtgacattcgcgcacttccctgaggacactgtggagcagaaggcagaaagcgtgggcagaattatgcctcacacggaggcccggatcatgaacatggaggcagggacgctggcaaagctgaacacgcccggggagctgtgcatccgagggtactgcgtcatgctgggctactggggtgagcctcagaagacagaggaagcagtggatcaggacaagtggtattggacaggagatgtcgccacaatgaatgagcagggcttctgcaagatcgtgggccgctctaaggatatgatcatccggggtggtgagaacatctaccccgcagagctcgaggacttctttcacacacacccgaaggtgcaggaagtgcaggtggtgggagtgaaggacgatcggatgggggaagagatttgtgcctgcattcggctgaaggacggggaggagaccacggtggaggagataaaagctttctgcaaagggaagatctctcacttcaagattccgaagtacatcgtgtttgtcacaaactaccccctcaccatttcaggaaagatccagaaattcaaacttcgagagcagatggaacgacatctaaatctgtgaataaagcagcaggcctgtcctggccggttggcttgactctctcctgtcagaatgcaacctggctttatgcacctagatgtccccagcacccagttctgagccaggcacatcaaatgtcaaggaattgactgaacgaactaagagctcctggatgggtccgggaactcgcctgggcacaaggtgccaaaaggcaggcagcctgcccaggccctccctcctgtccatcccccacattcccctgtctgtccttgtgatttggcataaagagcttctgttttctttggcttaaaaaaaaaaaaaaaaaa

SEQ ID NO: 708 - DNA, 2840 bp, Homo sapiens
agttgtccccggccttcgcgggtgcccgcagaacccgtcctcctcgtccaccccggagaggtcagagtcctcgccctgcactcccgggacgccgcatctgcgccgtcggacatccagcacccccggagtccaccggcaactcggttcttccaggtgatggtgtgcagccaccgccgcccctggcgtgcaggtgtgggctctccacattgggccggggaggggacttcgggcaacgcgctggaagcctcggcagtcgtggaaaccaagccccacactcccgggaagcctccaaattccgcgccctccgttactaggggcctccgaaaaccgtttccagactggatttgctctgagaggggcactgggcgatctgcaggtctggatgaaggagccctgggctttaaactgagcaggcagaaatgggcccctgctaggggctctgtggcttacgcgggggtcccgggagtgttgtgccccgggatgcctccggccctgcccagcaggcctctggtcccaccaggctgcttccagccctgggtagaatgagttacttcctgtcttactgcaaagctcatggcggcgcgctgctcaccggctaccaggccctgcgcgccgagggcttcctgtgcgacgtgacactggagaccgagggcagcgaattcccggcgcacaggtcgctcctggcgtgctccagtgactacttcagggccctgttcaagagccacacccaggaatcccgggcgcgcgtgatccacctgcacgtgccatcggcagccggcctgcagcgcctgctggacttcatctacactgcctggctgtcgctttccatggacactgtagaggacactctggaggccgccagctacctgcaggtcactgaggccctggggctctgtgggcgctacttggagcgccagctggctccagagaactgctgcttcgccgccaacgtggcagcgcgctttggcctggctcacacgctggacgcggccgagcgctgcatcgtgagccacttgcaggagctgctggcgcggggcgcgggccccgcgggactcctggagctcaaccctacatcgctgagggctgtactgggtgcccccgacgtggcgcgggtgcccgaggcccggctactgggcctggcgttagcttggttgcggcaggagcccacaactgagcgcctggcacactgtacagagttgctggagcgtgtccgctttggcctggttcccgccgacgtactgcggcgcgtgtactcgggctctggcctcgtgctgcccgcccgggtcaagggcctcatcatccaggccctcaactaccacacgacgccctcccgccagccgctcatgcagggcgagcagaccagcatccggagcccccagacccgcatcttgttggtgggggggcgcagggcacgggaggtggtgattgaggaggtcgcggccccgcagagggcagctaggggccaggtcgccgccccagagcccgaggaagaagaggaagagttggaggaagaggaggaggaggaggagtgggagctcacccagaacgtggtggccttcgatgtgtacaatcaccgctggcgcagccttacgcagctacccacaccactgctggggcacagcgtgtgcaccgcgggcaacttcctgtttgtcctgggtggggagagcccttccggcagtgcatcctctcccctggccgacgactcgcgggtggtcacggcccaagttcaccgttacgacccgcgcttccacgcttggacggaagtgcccgccatgcgggaagcgcgggcccacttctggtgcggcgcggtgggcgagaggctcctggccgtcgggggcctgggtgcgggcggtgaggtgctggcctcggtggagatgtacgacctgcgtcgggaccgctggacggcggctggggcactaccgcgggctctgcacggtcacgcgggggccgtcggggaccgcggtgttgtgtacatctcggggggcaaggcagggagaggcgagggcggagcgagcagcctccgggacttatacgtcctgggccctgaggagcaggtttggagcaagaaggcacccatgggcaccgcacgtttcgggcaccacatggcagtgctgcgcggcgctgtgtttgcttttctggggcgatacgagcccttctctgagatcgagcgctacgaccccggcgccgaccagtggactcggttgcggccgctgccctacgaccgcttctgctatgggctggccgtggtcgaggagacagcgttgctgctgggcggcctcaagtggcgggactcgcgccaggtgcctacccgcaacgtagtgggctacgacctcgacctggaccgttgggaggacatcggctgcgcgttgccctgggcctggagcggcctgcggtgcgcagtgctgcagctggccgagggtggggacgacgagagggagggagaggttggagaggcgctagatttggtgctgggctgaatgggtcagtccggtttccttccgcaatggaggagaaagtcgcgcttggttagtcttacagagcaacggatgggctttttctaagaaagggattctgggagcagagtggcttctgaaggttaacaggcaaacaaggccttgagcaaagagaaacatttctccttgagctgagaatgggagacagcggggcggggggtcaaatagaaggctatatgaatcaacttcagtgagctggtgaaagaaaatttttagaaaggctcacgcaaggctagagaaggactttcacaaataaaatatgaccttattttccctcttacagttaaagtgtttccctaggtgcaaaacagtgattacttatgtgcc

SEQ ID NO: 709 - DNA, 5827 bp, Homo sapiens
ggcgcgggtgcgggcgccccagccggccgcgatcgcgggatttctgcgccaggagatgaggggcggtagagccctggaatggagatgtccttgacgcctgggcagaggctgcagctgcaggaccctgtggccactggagataagtaatggtgccatttgaacacctactggaaacggggcaggaacagtgagtgaccccaggcgagcacaggcaggtgccaggagccaggatgcaaggatgacgcctccggaggccctggcctcactcccacctgggcgctaggagccatcccggggctccagccaggagccctgctgcccaggggcatggccaaacctttcttccgactccagaagtttctccgccgaacacagttcctgctgttcttcctcacggctgcctacctgatgaccggcagcctgctgctgctgcagcgggtccgcgtggctctcccacagggcccccgggcacccggccccctgcagaccttgccagtggccgccgtggcgctgggcgtgggcttgctggacagcagagccctgcacgaccctcgagtcagcccagagctgctgctgggtgtggacatgctgcagagccccctgacccggccccggcccggcccccgctggctccggagccgcaactcggagctgcgtcagttgcgtcgccgctggttccaccacttcatgagtgactcccagggaccgcccgccctgggccccgaggctgccaggcccgccatccacagccgaggcacctacattggatgcttcagtgacgatggccacgagaggactctgaaaggagctgtgttttatgacttgagaaagatgactgtctcccactgccaggatgcgtgtgctgagcggtcctatgtctacgccggcttggaggccggggcggagtgttactgcgggaaccggctgccagcggtgagcgtggggctggaagagtgtaaccatgagtgcaaaggcgagaagggctctgtgtgcggggctgtggaccggctctccgtgtaccgtgtggacgagctgcagccgggctccaggaagcggcggaccgccacctaccgcggatgcttccgactgccagagaacatcacacatgccttccccagctccctgatacaggccaatgtgaccgtggggacttgctcgggcttttgttcccagaaagagttccccttggccattctcaggggctgggaatgctactgtgcttaccctaccccccggttcaacctgcgggatgccatggacagctcagtatgtggccaggaccctgaggcacagaggctggcagaatactgtgaggtctaccagacacctgtgcaagacactcgttgtacagacaggaggttcctgcctaacaaatccaaagtgtttgtggctttgtcaagcttcccaggagccgggaacacatgggcacggcacctcattgagcatgccactggcttctatacagggagctactactttgatggaaccctctacaacaaagggttcaagggcgaaaaggaccactggcggagccgacgcaccatctgtgtcaaaacccacgagagtggcaggagggagattgagatgtttgattcagccatcctgctaatccggaacccatacaggtccctggtggcagaattcaacagaaaatgtgccgggcacctgggatatgcagctgaccgcaactggaagagcaaagagtggccggactttgtcaacagctacgcctcgtggtggtcctcgcacgtcctggactggctcaagtacgggaagcggctgctggtggtgcactacgaggagctgcggcgcagcctggtgcccacgttacgggagatggtggccttcctcaacgtgtctgtgagcgaggagcggctgctctgcgtggagaacaacaaggagggcagcttccggcggcgcggccggcgctcccacgaccctgagcccttcaccccggagatgaaagacttgatcaatggctacatccggacggtggaccaagccctgcgtgaccacaactggacggggctgcccagggagtatgtgcccagatgataggcctggcccacgccgccgcccccgctgagtgacgcaatcgcaccacggggctgcgctccccactctgatgctcaggcccgtggcctcactgggacgaacggtgggtggggggctcaccctggtgctgcctcccgcacaaggagacctggacacaacagacacacatcacaaggcgaacacaaatggacacacatacctggccacgaacccacacctcctcagacactcagacaccactccaggctcatagccccgtcttgatgcagagaagccacccacgtggggtgtgccaggcacccccagatacaaatgcagccacgcacagacgtaacacacaggtgccaggccgtgtgctcctggaggctggctggctgtctctctcacacagatacacgtgcgctccctgggatccgggaggccctgggcttcctgtgtgtagccctggcatagacttgctcgtcagggtgttcgactctgggatgctgggccgggcagacatttatgctctgagcagcaaggaccattgggatggaggtgggcacaaagactgctgcttccagggtgtgcggccctggccgtgtgtctgacatcccataaatgtgtgtgtggtgtgactacgggcaccacaaactccgcagccttgcctctcttttctctgtggctgggctggctgcaccatgggcagggttgaggactgccccccaccccgcccaagccaatgcagacactgacctcaagaccagccacaccaagtctgtgcactgcccaccacccccttcaacccctcctacaccatgctccggggcctggggcctccttgcctggcttcttcctccagctatcctcagggaagctggagattcaagtcatgccccagaagcaaggtgtaagcatgggggcgtggggaagagggcaggagctgaagttccaggggagcccaggacccctggggacctgtacactagcaggatgggtcttgggagttggcatggggagattgtaagggctgtatctccgcgattactggtactggtgctccacccataggggccctgttctctctggggtcccacactggggtcatgagagctagttagtactcagcctgacccctaggtctggtcctgccagcctgggatgggggtcaatgtatgctacacatcttgggctcacaagtgaggctgtggaggccaggaggttcaagtatggagggtaggagtgcaacccaggagcaacgctcaaggtggccgagatgcagggaggattgtggcgatccggttgcacactggcctctgtggaggtcagggaggtgggaaggtgggtgggcctgaactcaggcagcccttcagtggcttcttcaggcctaggataaccctggccaggccccatggtcctgctctgggtcagctgtcagggagacctcccttcagcctgagccaagctgcattgggaggagaaggcagggtgagggatctgggagagcaggacgttgagatatcctgaccctctgcttcctagcctgatgatggggaacccagagccacccgctatgagcacaggccgggggtggaaggcccagtagagctgcccttccccagatggaagcttcctccaaccttcagtttggccagtgggtgggtttgggcatctgtgcccctggtggcctccaaatccttcctgggattcccccaaacccacactgatgcgaagctgttcttgaccctcccatagcatcaactcagttcagctcaaagctagaaacaccaaggtctttgaaaatgtttattggctcaggatagcttcggcatccaatctgcgaaggcccctgatggagctatttcttcctagtatcaggagcaattgagacccctcaggagtttccacactgctgtggacgggatagccagggcagacctgcatcccagagcaagcctagatccttgaaagcaatgtcaggcgtggcagtggggaagccatggaggctgggaagggcaaagtgtggagagaggagtgaccgggactggagccagggtctggggagagcaacagcaccaggcttttcctggtagttggattggtacattcactgctgccaggtacccagagatgtcatctctctccaggtagagcatcaccagctcctgtggccttgtagatgactctgtacctcagtgaagagtgcaggcaagtagagtgatggggtcagtgtccatccagtttacgctgagtcagtccatacagcaagacacctggcacttggcaggtactcctggatgttgatgagcaaggaagagcaacggccctgtcagctggcagtggtcctcacagccttcatcccaggtctgcctacgtgggagatctcatcagaaacaggaacggggatctgtctgtgcttgcaggaaagtccatttgtttttctccaagttaggtctcatctacagctcttagcttctcagtaaagaggatactctcccaaccagccaaggaataaaagctgatctgtatgtagggcagaagtgtggcaaatgcatcaggaaccggttagaacagaacagagaaaccctgactgtctacagattccaactttaatagcaagcctgtggagttacacaaacctgtgttaaaacatgtaatttttatggatttcatctcccgttgtggatcaatttggaaaaaccaaaatatgtaattttaaaaaactaaaacacatcctggtagtcccagtgatgtgtaaatgagagagaagaatagacaggcttccaaaccctgggaagaaagctgcttaattatgtgaacatcttataatgaagtctcttgcagctaaaattagattttgagtgcatgaatctgtgataatgtttgcatatcagaatgcattctccccttaaaagtagcagtagccacttggttcttagggggccccaagaggagaggagaagtgctgaggttgatgttacgactgcaagaattcttgggacacaggtttgttttctgctgacttgctcggaaacccattggaggtatctgaaatgtgatgactccaaaggggttcatttcactatagggagaaattgattcgtctgacttcctatttatcaccactcaatattgggtgagttggtctgaacaaggtggggataaagtagagtggaaataatgtagagtcgtcagactgaaaggccaggttgtagtcccagctcttatctgccatcttggacaaagcttttcccatctccagtctcagtttcccatccataaaatgggggaagtggtaggtcttgctgattgcatccacattcattcctccatttcctttcccagcaaccccccatttctgtttgggaattcatatgatctgccagagcctctccaggggtggaatacatgtcctggactaagccaatgacaccttccatctttccagctatggtgactgggttaggtatgatcttgtgagttaagacaatgaagccagagggaatttcaagacttatgggaatgctgggtagaagctgttttaattcccctgttgaatgtgaaaaaggtagtagtattcctgggtctttatgatgaccaccttgggccttgggatcatgaccaggaatcacgtgaagctgacaccactgaagggagagttgagaggcagaaagagatcaagtccttggtgaaattgtttaagtacaggatcaagccttgcttgagattggccttacctctggactttttttgttatatgagctaataaattctgtttattgtttaaaaaaaa

SEQ ID NO: 710 - DNA, 3756 bp, Homo sapiens
ttcagaaggtcagtaataataaacttctcccagctaaaggaggatgttctaacccatcgcaaggaagctaaaaaccttgaaaatagattagacgaatggctaactagaataaacagtgtagagaagaccttaaatgacctgatggagctgaaaaccatggcacgagaactttgtgacacatgcacaagcttcaatagccgattcgatcaagaaaggatatcagtgattgaagatcaaattaatgaaataactcaagaagattagagaaaaaagagtaaaagggaacgaacaaagcctccaagaaatatgggactatgtgaaagaccaaatctacgtttgattggtgtacctgaaaatgacagggagaatggaaccaagttggaaaacactcctcaggatattatcaaggagaacttccccaacttagcaaagcaggccaacattcaaattcaggatatacagagaatgccacaaagatactcctcaagaagagcaaacccaagacacataattggcagattcaccaaggttgaaatgaaggaaaaaatgttaagcgcagccagagagaaaggtcgggttacgcacaaagggaagcccatcagactaacagcggatctctcggcagaaaccctacaagcccgaagagagtgggggccaatattcaacattcttaaagaaaagaattttcaacccagaatttcatatccagccaaactaagcttcataagtgaagaataaaatcctttccagacaagcaaatgctgagagattttgtcaccaccaggcctgccctaaaagagctcctgaaggaagcactaaacatggaaaggaaaaaccggtaccagccactgcaaaaatatgccaaattgtaaagaccatcgatgctatgaagaaactgcatgaactaacaagcaaaataaccagctaacatcataatgacaggatcaaattcacacataacaatattaaccttaaatgtaaatgggctaaatgccccaattaaaagacacagactggcaaattggataaagagtcaagacccatccgtgtcctgtattcaggagacccatctcacgtgcagagacacacataggctcaaaataaagggatggaggaagatctaccaagcaaatggaaagcagaaaaaagcaggggttgcaatcctagtctctgattaaacagactttaaaccaacaaagatcaaacgggacaaagaaggccattacataatggtaaagggatcaattcaacaagaagagctaactatcctaaatatatatgcacccaatacaggaacacccagattcataaaacaagtccttagagacctacaaagaaacttagactcccacacaataataatgggagactttaacaccccactgtcaatattagacagatcaatgagacagaaggttaacaaggatatccaggacttgaactcagatctgcaccaagcagacttaatagacatctacagacctctccaccccaaatgaacagagtatacattcttctcagcaccacatcacacttattccaaaattgaccacatagttggaagtaaagcactccttagcacatgtaaaggaacagaaatcacaacaaactgtgtctcagaccacagtgcaatcaaattagaactcaggattaagaaactcactcaaaactgcacaactgcatggaaactgaacaatctgctcctgaatgactactgggtaaataacgaaatgaaggcagaaataaagacgttctttgaaaacaatgagagcaaagacacaacgtgccagaatctctggaacacacttaaagcacggtatatagggaaatttatagcactaaatacccacaagagaaagcaggaaagatcaaaatcaacaccctaacatcataattaaaagaactagagaagcaagagcaaacaaattcaaaagctagcagaaggcaagaaataactaagatcagagcagaactgaaagagatagagacacaaaaacttcaaaaaaatcaacgaatccaggagctcgttttttgaaaagatcaacaaaattgatagactgttagcaagactaataaagaagaaaagagagaagaatcaaatcgatggtataaaaagtgataaaggggatgtcaccaccaatcccacagaaatacaaactaccatcagagaatactataaacacctctacacaaataaactagaaaatctagaagaaatggataaattcctggacacatacagcctcccaagactaaaccaggaagaagttgaatctctgattagaccaataacaggctctgaaattgaggcagtagttaatagcccaccaaccaaaaacagtccaggaccagacagattcacagccaaattctaccagaggtacagaggagctggtaccattctttctgaaactattcctagcaatagaaaagagggaatcctccctaattcattttatgaggccagcatcatcctgataccaaagcctggcagagacacaacaaaaaaaaaaaaaagagaattttataccaatatccctgatgaacatcgatgcaaaaatcctcaataaaatactggcaaaccgaatccagtagcacatcaaaaagcttctccaccacgatcaagtgggcttcatccctgggatgcaaggctgtttcaacatatgcaaatcaataaacataatccatcacagaaacagaaccaatgacaaaaaccgcttgattatctcaatagatgcagaaaaggccgtcgacaaaattcaaaagcccttcatgctaaaaactctcaataaactaggtattgatagaacgtttctcaaaataataagagctatatatgacaaacccacagccaatatcatgtggaatgggctaaagctgttgacctgatagatatgggttcaagaggacacagctgaatactgtgcttaggaaaagaacagtttcaaaggctttccagattgtcagatttgatgatatcctccttggtgcacacctctcttggctatggggcacataaaccacctctaccaatctaactggtttgtgcagtttttctgattttgtatctaccggcaaaatatatcttaagccatttttaggaaacaggaggtttagtcacgtgctcaacaaaagcacaacaaatggggagcatttaatggtgtaagggctgtgaggtgtagctgctgaaactgtagctaggagctgccttgctgccttcttgcaggcagattggtcagatgagccaggctaaaatacaattaatatctaccattgtggtttaatatgaaatatggatacctggtctttgtctcagttcttgtcatagagttccccaaacctttagaacttcctgagtggtaggaatatctcattagtgataatgagcccctttgattcgataactcctgagtttatgctaatgaggttacttaatgtggggccctagatattcttaggatggggctagttcccggaaagaccaggtcatttgaggattagagggttggaacttttagctctacccactgatctctgggtggggaaggtgctggagatcaagctgcctaaaaactcttgaacaacaagatttgaggagcttccagtaaatgcgtccacaagctgggagggcactgcaccccagtttcactgggacagaagctcttgcacttggaatctttccagacctagcccttcatgctgcttcatctggctgttcatctgtatcctttataataaattggcaaatgtaaaggt

SEQ ID NO: 711 - DNA, 3585 bp, Homo sapiens
cctggagcccgttctctaagggacagcccaggactttcaaaaactgcaaatcagatcatttcactcctcaaccagaatctccccctcacacttagaatgaaaccaaaacccttccccagggcctaaaagtcccagagaactgggctcctccccgacctcatcacagcagcaccacccctttctcccctcctccaagaagggcagccgaaccaccctctccccgacaatgagggctcttttcatttcctccaagaactcacgcttgttccctcaggaactttgcacttgctgttccttaatgcctagccttctttctggtggctcttcttgtcctgcagaagtcgactcaaacatgacgtcctccttgaaggaccctccacccccaccccactccttactctctatcatttcccgggtctctttacagcccttactgtctccctgaaactacctggctccggcatgtgtccatgccctctggactctaagctgcttgaagcagtgaacttggtggtctcacgtgccgctgacagcagaccccagaacaagtggagctcaggaaatgtgggaggattgatagcagtgtgggtggatagacttagagatattgtgtccaggccacaaggcatcagcagagccgagcatcagccaggacaatctgaccctgaacctgacaacttaatcctgaagctgtgttgcctctgcagtattcggttaagagttctgctgcctgagttggcatccctgctttgtgaagttattgtgtgtcggctgggcacggtgtctcatgcctgtaatcccagcactttgggaggccgaggagggtggatcgcttaaggccaggagctcaggaccagcctggccaacatggtgaaaccccgtctctcctaagaaaacaaaaaaatttgccgggcagggtggcgcacgccagtaatcttagctacttgggaggctgaggcaggagaatctcttgaacttgggaggcggacattgccgtgagctgagatagtgccactgcgctctagcctgggccaaagagtaaagatctgtctcaaaataaataaataaataaaaaataaaaacaacaataaatgactgtgtgtccttaggcaaggcacttagcaactcttgagcttgttccatctgtaaacccaggacgttagtgattctccctctagtggatgaaatgaagcaatgcagatagagccctaatgcagggtacctgcgagtcgctgcagcagctgtggcaattgtcaccttcatccaggcccatcccgctttgagggcctagagagagtgggccagaggttaacccccgattcatctgcctccccacgctgggcatctgggtgtgccagggcattcccccgctggtcagacaggtttttgggccagggcggggctgaccagggttaattagagggaactggctaggaggagctggggagggggctgggcagagtccaggcctccagagcccctgggacacagcaggtgtgtgctgccatgggccggggcttgaactctgccagactcaggcgccaaaaacggcgcttgcgacctcaggtccagaagccccggcagcagctggaggtgagtggtcatcagagatccccccaccccaacccttgccccgggcccacgcgtcctgtctgctcggaaccttccctctaaatctctgggtcttgctcacgcttcctccctcactctcccttgcttttgtgtctgtcttggacacaaggcccccttaggctttctccctaggtgtctgtccctccatcgccatctctctgtgcctgcccagtctcatcggtgcctctctgcctctgtccctctgccctggcccccacagcggctccagcaggagaaccatgagctccggcgaggcctggcagcccgaggagccgagtgggaggcccgggccgtggagctggagggggacgtggaggccctgcgggcccagcttggggagcagcgctcagagcagcaggacagtgggcgagaacgggcacgggccctcagcgagctcagcgagcagaacctccggctcagccagcagctggctcaggcctcccagactgagcaggaacttcagagggaactggacgcccttcggggacagtgccaggctcaggcactggctggagcagagctgaggacgcggctggagagtctgcagggggaaaaccagatgctgcagagccgccggcaggacctggaggcccagatccgaggcctgcgtgaggaggtggagaagggtgagggcagactgcagaccacccacgaggagttgctgctgctgaggcgggagcggcgggagcacagcctggagctggaacgcgcacggtcagaggctggggaggcgctgagtgcgctgcggaggctgcagcggcgcgtctccgagctggaggaggagtcacgcctccaggacgccgacgtgtcggctgcctcgttgcagtcagaactggcccacagcctcgacgacggcgaccagggccagggcgccgacgcacccggagacaccccgaccacccggtccccaaagacccgaaaggcgtccagcccccagccttcacccccggaagagatcttagagccccccaagaagcgaacatccctcagtccagcggagatactggaggagaaggaggtggaagtggccaagctgcaagatgagatctcgctgcagcaggcagagctgcagtccctgcgggaagagctgcagaggcagaaggagctgcgggcgcaggaagaccctggggaggccctgcacagtgccctctcagaccgggacgaggccgtgaacaaggccctggagctgtccctgcagctcaaccgcgtctcgctggagcgagactccctgtctcgggagctgctgcgcgccatccgccagaaggtggcgctcacgcaggagctggaggcctggcaggacgacatgcaggtggtgatcgggcagcagctgcgctcacagcgccagaaggagctgagcgcctccgcgtcgtcgtcgaccccgcgccgtgccgcgccccgcttctcgctgcgcctgggccccgggcccgccggtggctttctcagtaacctcttccgaaggacctgacggctgggcccagagggctgcccttgcccacttaggggctcactttcctcttcaggccaatggagcgacagggcccagattgtcttccaaaagaagctgatgccctccccgccccaggatgctgggcaagggctcatcgggagcaggggctcatccggagcaggggccagctttgtggggcaggagctccaggtgggtggcaggggcaggtgaacagagctattttccgaattaatataggtctatcttttctagggcagggatggggctgggtatttatgtatcaagatcggacagagtaatatataaatcactccaccgatttggcccccattcatagaaagaaagagcatggtaaaaaagcctgaaactttattgtaaaaaaaaaaaaaaaagaaaatgaaaaacactctaaaaccctgagctggctgggggtgtcgtcagagatcagaaggacagggagaaggctcggtaacccaggttggtga

SEQ ID NO: 712 - DNA, 678 bp, Homo sapiens
atgggtgataactctctgggtattgccgtggcaaagggtagtaacttcaggcatctccacgtgtcggtcctgaagctgcttgtgtctggatcagtggtttctgagcaccctctagagacaacagagggatttgttccatttgagagaatagatttttcccatcatgtggttgctggatcaaacggaacgcataggagcaagatagtggtcatacctgtcttaataacggcagtcattgagcatgtagaagttgctggacctccagcacaccccaggcccccagaagaagtggggcctcctggtgcaccaggtttaccacaatatacaggagaaataagtgaaatgacaaaatgcccctgtcctgatatagaaaggtcagcctttaccgtgaagctcagtggaaaacttcctcttccttccaagcccatcatcttcacaggggtcctgtacaatgcccagagggatttaaaggaggccatgggagtctttgcttgcagggtgcctgggaattactactccagctttgatgttgagctgcatcattgcaaggtgaatatttggctaatgaggaagcaaattttgtgggagctgatgtcaactcttcagaaatgtcaaggttctgcaattctcatagattcccaggagctcgaagttcccaagtacgtcttccagggatga

SEQ ID NO: 713 - DNA, 3586 bp, Homo sapiens
cctggagcccgttctctaagggacagcccaggactttcaaaaactgcaaatcagatcatttcactcctcaaccagaatctccccctcacacttagaatgaaaccaaaacccttccccagggcctaaaagtcccagagaactgggctcctccccgacctcatcacagcagcaccacccctttctcccctcctccaagaagggcagccgaaccaccctctccccgacaatgagggctcttttcatttcctccaagaactcacgcttgttccctcaggaactttgcacttgctgttccttaatgcctagccttctttctggtggctcttcttgtcctgcagaagtcgactcaaacatgacgtcctccttgaaggaccctccacccccaccccactccttactctctatcatttcccgggtctctttacagcccttactgtctccctgaaactacctggctccggcatgtgtccatgccctctggactctaagctgcttgaagcagtgaacttggtggtctcacgtgccactgacagcagaccccagaacaagtggagctcaggaaatgtgggaggattgatagcagtgtgggtggatagacttagagatattgtgtccaggccacaaggcatcagcagagccgagcatcagccaggacaatctgaccttgaacctgacagcttaatcctgaagctgtgttgcctctgcagtattcggttaagagttctgctgcctgagttggcatccctgctttgtgaagttattgtgtgtcggctgggcacggtgtctcatgcctgtaatcccagcactttgggaggccgaggagggtggatcgcttaaggccaggagttcaggaccagcctggccaacatggtgaaaccccgtctctcctaagaaaacaaaaaaatttgccgggcagggtggcgcacgccagtaatcttagctacttgggaggctgaggcaggagaatctcttgaacttgggaggcggacattgccgtgagctgagatagtgccactgcgctctagcctgggccaaagagtaaagatctgtctcaaaataaataaataaataaaaaataaaaacaacaataaatgactgtgtgtccttaggcaaggcacttagcaactcttgagcttgttccatctgtaaacccaggacgttagtgattctccctctagtggatgaaatgaagcaatgcagatagagccctaatgcagggtacctgcgagtcgctgcagcagctgtggcaattgtcaccttcatccaggcccatcccgctttgagggcctagagagagtgggccagaggttaacccccgattcatctgcctccccacgctgggcatctgggtgtgccagggcattcccccgctggtcagacaggtttttgggccagggcggggctgaccagggttaattagagggaactggctaggaggagctggggagggggctgggcagagtccaggcctccagagcccctgggacacagcaggtgtgtgctgccatgggccggggcttgaactctgccagactcaggcgccaaaaacggcgcttgcgacctcaggtccagaagccccggcagcagctggaggtgagtggtcatcagagatccccccaccccaacccttgccccgggcccacgcgtcctgtctgctcggaaccttccctctaaatctctgggtcttgctcacgcttcctccctcactctcccttgcttttgtgtctgtcttggacacaaggcccccttaggctttctccctaggtgtctgtccctccatcgccatctctctgtgcctgcccagtctcatcggtgcctctctgcctctgtccctctgccctggcccccacagcggctccagcaggagaaccatgagctccggcgaggcctggcagcccgaggagccgagtgggaggcccgggccgtggagctggagggggacgtggaggccctgcgggcccagcttggggagcagcgctcagagcagcaggacagtgggcgagaacgggcacgggccctcagcgagctcagcgagcagaacctccggctcagccagcagctggctcaggcctcccagactgagcaggaacttcagagggaactggacgcccttcggggacagtgccaggctcaggcactggctggagcagagctgaggacgcggctggagagtctgcagggggaaaaccagatgctgcagagccgccggcaggacctggaggcccagatccgaggcctgcgtgaggaggtggagaagggtgagggcagactgcagaccacccacgaggagttgctgctgctgaggcgggagcggcgggagcacagcctggagctggaacgcgcacggtcagaggctggggaggcgctgagtgcgctgcggaggctgcagcggcgcgtctccgagctggaggaggagtcacgcctccaggacgccgacgtgtcggctgcctcgttgcagtcagaactggcccacagcctcgacgacggcgaccagggccagggcgccgacgcacccggagacaccccgaccacccggtccccaaagacccgaaaggcgtccagcccccagccttcacccccggaagagatcttagagccccccaagaagcgaacatccctcagtccagcggagatactggaggagaaggaggtggaagtggccaagctgcaagatgagatctcgctgcagcaggcagagctgcagtccctgcgggaagagctgcagaggcagaaggagctgcgggcgcaggaagaccctggggaggccctgcacagtgccctctcagaccgggacgaggccgtgaacaaggccctggagctgtccctgcagctcaaccgcgtctcgctggagcgagactccctgtctcgggagctgctgcgcgccatccgccagaaggtggcgctcacgcaggagctggaggcctggcaggacgacatgcaggtggtgatcgggcagcagctgcgctcacagcgccagaaggagctgagcgcctccgcgtcgtcgtcgaccccgcgccgtgccgcgccccgcttctcgctgcgcctgggccccgggcccgccggtggctttctcagtaacctcttccgaaggacctgacggctgggcccagagggctgcccttgcccacttaggggctcactttcctcttcaggccaatggagcgacagggcccagattgtcttccaaaagaagctgatgccctccccgccccaggatgctgggcaagggctcatcgggagcaggggctcatccggagcaggggccagctttgtggggcaggagctccaggtgggtggcaggggcaggtgaacagagctattttccgaattaatatacgtctatcttttctagggcagggatggggctgggtatttatgtatcaagatcggacagagtaatatataaatcactccaccgatttggcccccattcatagaaagaaagagcatggtaaaaaagcctgaaactttattgtaaaaaaaaaaaaaaaaagaaaatgaaaaacactctaaaaccctgagctggctgggggtgtcgtcagagatcagaaggacagggagaaggctcggtaacccaggttggtga

SEQ ID NO: 714 - DNA, 2201 bp, Homo sapiens
atggctacaaagttagcgatgctttatgctaggaaacttgttgacagtaacctgtgcgactttatgcagaagacaaatgctagtaattattatgcacagaggaaaaatcattttaagtatgtggtaaagcagcttcatctttcaaaattgatttgctctggtttttctttagtccattagattccagaatgtccttttactgggaatttagttatgtattaagataacctgttttcagttctttttgaaaagaagacattatttatattgaaccaccttattttaaaatttttaacttttatataccacttgtgtgattccagtgtcatgtcttgggtttgatgtcgttggacagaaaagtgtatcaattattttaaatgaatttttccccatgtttgaggcttagtctgtaaatgtgttgctgtaacagaaaatacttgggtatgcattacttgaatacttgaaaactgaaattaataagatgtattacataatgaattagatttctctgaacagtttttacactgaaaatcttcatttctggattgcagtttgaaatggaatgaagacctgaattatttgggtagaaaaaattatgatagtgcttataagaactgtaaactgttttaaactattttgtgtttgacgcatcaaacttcaagttttttgtaagtttctctcctgaaattttctttctcttctatactttatgcacttactatactactgatgtaataaaagagcagggttaaaaatattgtatctgtattcattgtgaatcctgtagcttttctagttaacaaaaaatcgctttctaaaatactcttaatcccattgttttggttaacatcttacccatttgttgtatttcaaatgccattaatcattttagtacaacacctatgtttataaaaatttgaaaacattacatattgtatttaaaactaattagtgaagagtaagaaaaaaactagccaacagaattgtaggtgatgcattagttaaatttcaaaactcataataaaggaactttcagagattggttgaaacccagtggtatccctgtaaattagctcctgtgactggaaaagaccccaaaaaggcagtagaggagattagtgtttacttgctgtggttgtggtgtgctgctacttaattataggtagtgacacactgaaattcttatttgtccaataatctgaagtagtttcctatatttatctgtactaaattgactataaattgagtctgcaaagaggaaactttttgactgtactgtatttaggagcctttgtacagcttggtcaaatttccatgatatgaagtatttgagttttaaaatatactgttattaaaaggaaaaagacatggccattattccatgtgcttaaatgataatttccttattcagtttcagaagaaaaagaatgaaattgggtaactgtcattgcgttagctttatgttgaattgggaaattgtggcataaagcttaaattcgtgtttatcaaatgtgaaccatagtagtataatgctgctttgtatataatgtaagtgctacaaatagtctcagcactgaaaatgtattgatacctcttaaatgaatgcaacttttgatgtaggtgttttgctatgcctcagaaaatatctgtctgagaatttgttaatctgtttgataatgaagatacttcctgttttcttgtttcatattttcatgttcaaaatttaagttttacatttttactactgttaatttaaataaaatttgttctgtggataaaatgaggttggcagtgaagaaaattaaaaacagcctcattcatgtaactggttaagtaaaaatacattttcactatgtgttcataaacttttaatgaagctgtttgtctttcagttcaaatataagtgatgtttaggctttatttctgttaataaggctttttaccattgattaaatgaaggaatgtatctttttgaagagatttatattctgtaaataaaaattcgttgtaacaataaagttgagttctaactacagtgtattcataaattttattgttacttcaacttatttttgaggttttccttgtgaatatctgcaaacacaagactttccaaagttagtgtataaatgtatatgtggagtgattctttgaattctagttttttgttttctgtttttttagttttatatacattaaaa

SEQ ID NO: 715 - DNA, 2360 bp, Homo sapiens
cgcggccccaagcggttcccgagcccaggcccgcgccgagcccaggtcctagagcagctccagcaggatggcggctccagcgtctctaaggcctgcagggggtccagccccatggggggcgccctaggcctccgacagctccccatctgtgctcctgcctgccggccatcctcaggccactcgccatgggcggctgcttctccaaacccaaaccagtggagctcaagatcgaggtggtgctgcctgagaaggagcgaggcaaggaggagctgtcggccagtgggaagggcagcccccgggcctaccagggcaatggcacggcccgccacttccacacggaggagcgcctgtccacccctcacccctaccccagccctcaggattgcgtggaggctgctgtctgccacgtcaaggacctcgagaatggccagatgcgggaagtggagctgggctgggggaaggtgttgctggtgaaggacaatggggagttccacgccctgggccataagtgtccgcactacggcgcacccctggtgaaaggcgttctgtcccgtggtcgggtgcgctgcccctggcacggcgcctgcttcaacatcagcactggggacctggaggacttccctggcctggacagtctacacaagttccaggtgaagattgagaaggagaaggtgtacgtccgggccagcaagcaggccctacagctgcagcgaaggaccaaggtgatggccaagtgtatctctccaagtgctgggtacagcagtagcaccaatgtgctcattgtgggtgcaggtgcagctggcctggtgtgtgcagagacactgcggcaggagggcttctccgaccggatcgtcctgtgcacgctagaccggcaccttccctacgaccgtcccaagctcagcaagtccctggacacacagcctgagcagctggccctgaggcccaaggagtttttccgagcctatggcatcgaggtgctcaccgaggctcaggtggtcacagtggacgtgagaactaagaaggtcgtgttcaaggatggcttcaagctggagtacagcaagctgctgctggcaccagggagcagccccaagactctgagctgcaaaggcaaagaagtggagaacgtgttcactatccggacgccagaggatgccaatcgcgtggtgaggctggcccgaggccgcaacgtggtcgtcgtgggagccggcttcctggggatggaggtggccgcttacctgacggagaaggcccactctgtgtctgtggtggagctggaggagacgcccttcaggaggttcctgggggagcgcgtgggtcgtgccctcatgaagatgtttgagaacaaccgggtgaagttctacatgcagacggaggtgtctgagctgcggggccaggagggaaagctgaaggaggttgtgctgaagagcagcaaggtcgtgcgggctgacgtctgcgtggtgggcattggtgcagtgcccgccacaggcttcctgaggcaaagcggcatcggtttggattcccgaggcttcatccctgtcaacaagatgatgcagaccaatgtcccaggcgtgtttgcagctggcgatgctgtcaccttcccccttgcctggaggaacaaccgcaaagtgaacattccacattggcagatggctcatgctcaggggcgcgtggcagcccagaacatgttggcgcaggaggcggagatgagcactgtgccctacctctggaccgccatgtttggcaagagcctgcgctacgcgggctacggagaaggcttcgacgacgtcatcatccagggggatctggaggagctgaagtttgtggctttttacactaaaggcgacgaggtgatcgccgtggccagcatgaactacgatcccattgtgtccaaggtcgctgaggtgctggcctcaggccgtgccatccggaagcgggaggtggagactggcgacatgtcctggcttacggggaaaggatcctgagctcacatgcagtagacttgggcaggcaaagggggcaccaagggcacaggccaagccttgggggcaggtgccaatctccagtcccaggatcccccagggcagaacctgagccctcccagtgcttgccttcagccacctggctcccctcctgggaggcctctgctggatccagaagatgctcaaccctcaaggcctctgctgccactgacagctggcactggaggcaggacaagccctgcctcttctccctctattgggactggtcccctgaagaaccctgcaacatgttagacattaccgtaaaattaaaacgcacaaatttgcagaaaaaaaaaaaaaaaaaaaaaaaaaaaaaaaaaaaaaaaaaaaaaaaaaaaa

SEQ ID NO: 716 - DNA, 1419 bp, Homo sapiens
gacacaggaaactcccctgaaacctgtttctcagcttcccggcccagctggggcacccactggaaggagaggccaggcggaagaccctggctccgtcatggcctctgccctgaggccaccccgtgtccccaagcctaagggtgtcctgccttcacactactatgagagctttctagagaagaaggggccctgtgaccgggattacaagaagttctgggcaggcctgcagggtctcaccatttatttctacaatagcaatcgggacttccagcacgtggagaagctcaacttgggagcatttgagaaactcacagatgagattccctggggaagctcacgtgaccctggcacccacttcagcctgattctccgggatcaggagatcaagttcaaggtagagaccttggagtgtcgggaaatgtggaaaggcttcatcttaacggtggtggagctccgtgtcccgaccgacttgaccctgcttcctgggcacctatacatgatgtctgaagtcttggccaaagaggaggcgcgccgtgcactggagacaccctcgtgcttcctgaaggtgagccggctggaggcacaactgctcctggagcgctaccccgagtgcgggaacctgctgctgcggcccagcggggacggcgccgacggcgtgtcggtcaccacgcggcagatgcacaacgggacgcacgtggtccggcattacaaggtgaagcgggagggccccaagtacgtgatcgatgtggaacagccgttctcttgcacctccctggacgccgtggtcaactatttcgtgtcgcataccaaaaaggcgctggtgccattcctgttagacgaggactacgagaaggtgctaggctacgtggaagccgataaggagaatggcgagaatgtgtgggtggcgccctccgctccgggcccaggtcctgcaccctgcacaggtggccccaagccgctgtcacctgcgtctagccaggacaagctgcccccactgcccccactaccgaaccaggaagagaactacgtgacccccattggagatggcccagctgttgactatgagaaccaagatgtggcttcctctagttggccagtcatcctgaagccaaagaagttgccaaagcctcctgccaagcttccaaagccacccgttggacccaagccagagcccaaagtctttaatggtggcttgggcaggaagctgccagtcagttcagcccagcctctcttccccacagccgggctggcagacatgacggcagagctacagaagaagctggagaagaggcgggcactggagcactgattcggacacaccagggaccagcgggctagtcccagggcatggcccagcggccagattctttttcccaggattaaaactctgaccccaggaaaaaaaaaaaaaaaaaaaaa

SEQ ID NO: 717 - DNA, 1557 bp, Homo sapiens
gacacaggaaactcccctgaaacctgtttctcagcttcccggcccagctggggcacccactggaaggagaggccaggcggaagaccctggctccgtcatggcctctgccctgaggccaccccgtgtccccaagcctaagggtgtcctgccttcacactactatgagagctttctagagaagaaggggccctgtgaccgggattacaagaagttctgggcaggcctgcagggtctcaccatttatttctacaatagcaatcgggacttccagcacgtggagaagctcaacttgggagcatttgagaaactcacagatgagattccctggggaagctcacgtgaccctggcacccacttcagcctgattctccgggatcaggagatcaagttcaaggtagagaccttggagtgtcgggaaatgtggaaaggcttcatcttaacggtggtggagctccgtgtcccgaccgacttgaccctgcttcctgggcacctatacatgatgtctgaagtcttggccaaagaggaggcgcgccgtgcactggagacaccctcgtgcttcctgaaggtgagccggctggaggcacaactgctcctggagcgctaccccgagtgcgggaacctgctgctgcggcccagcggggacggcgccgacggcgtgtcggtcaccacgcggcagatgcacaacgggacgcacgtggtccggcattacaaggtgaagcgggagggccccaagtacgtgatcgatgtggaacagccgttctcttgcacctccctggacgccgtggtcaactatttcgtgtcgcataccaaaaaggcgctggtgccattcctgttagacgaggactacgagaaggtgctaggctacgtggaagccgataaggagaatggcgagaatgtgtgggtggcgccctccgctccgggcccaggtcctgcaccctgcacaggtggccccaagccgctgtcacctgcgtctagccaggacaagctgcccccactgcccccactaccgaaccaggaagagaactacgtgacccccattggagatggcccagctgttgactatgagaaccaagatgtggcttcctctagttggccagtcatcctgaagccaaagaagttgccaaagcctcctgccaagcttccaaagccacccgttggacccaagccagtagagaaggggtttcaccatgttgcccaggctggtctcgaactcctgacctcaagtgatccacccacctcagcctcccaaagtgctgggattaccggcgtgagccaccacacctggcctcatctgtcttctcttccagagcccaaagtctttaatggtggcttgggcaggaagctgccagtcagttcagcccagcctctcttccccacagccgggctggcagacatgacggcagagctacagaagaagctggagaagaggcgggcactggagcactgattcggacacaccagggaccagcgggctagtcccagggcatggcccagcggccagattctttttcccaggattaaaactctgaccccaggaaaaaaaaaaaaaaaaaaaaa

SEQ ID NO: 718 - DNA, 3140 bp, Homo sapiens
cgaggagccgcgagccccagccaatgagcgccggcgggccggttgcccaggcgaccagtgcgcggctccgccccccgcggcgaggctcccgcgcgcggctgagtgcggactggagtgggaacccgggtccccgcgcttagagaacacgcgatgaccacgtggagcctccggcggaggccggcccgcacgctgggactcctgctgctggtcgtcttgggcttcctggtgctccgcaggctggactggagcaccctggtccctctgcggctccgccatcgacagctggggctgcaggccaagggctggaacttcatgctggaggattccaccttctggatcttcgggggctccatccactatttccgtgtgcccagggagtactggagggaccgcctgctgaagatgaaggcctgtggcttgaacaccctcaccacctatgttccgtggaacctgcatgagccagaaagaggcaaatttgacttctctgggaacctggacctggaggccttcgtcctgatggccgcagagatcgggctgtgggtgattctgcgtccaggcccctacatctgcagtgagatggacctcgggggcttgcccagctggctactccaagaccctggcatgaggctgaggacaacttacaagggcttcaccgaagcagtggacctttattttgaccacctgatgtccagggtggtgccactccagtacaagcgtgggggacctatcattgccgtgcaggtggagaatgaatatggttcctataataaagaccccgcatacatgccctacgtcaagaaggcactggaggaccgtggcattgtggaactgctcctgacttcagacaacaaggatgggctgagcaaggggattgtccagggagtcttggccaccatcaacttgcagtcaacacacgagctgcagctactgaccacctttctcttcaacgtccaggggactcagcccaagatggtgatggagtactggacggggtggtttgactcgtggggaggccctcacaatatcttggattcttctgaggttttgaaaaccgtgtctgccattgtggacgccggctcctccatcaacctctacatgttccacggaggcaccaactttggcttcatgaatggagccatgcacttccatgactacaagtcagatgtcaccagctatgactatgatgctgtgctgacagaagccggcgattacacggccaagtacatgaagcttcgagacttcttcggctccatctcaggcatccctctccctcccccacctgaccttcttcccaagatgccgtatgagcccttaacgccagtcttgtacctgtctctgtgggacgccctcaagtacctgggggagccaatcaagtctgaaaagcccatcaacatggagaacctgccagtcaatgggggaaatggacagtccttcgggtacattctctatgagaccagcatcacctcgtctggcatcctcagtggccacgtgcatgatcgggggcaggtgtttgtgaacacagtatccataggattcttggactacaagacaacgaagattgctgtccccctgatccagggttacaccgtgctgaggatcttggtggagaatcgtgggcgagtcaactatggggagaatattgatgaccagcgcaaaggcttaattggaaatctctatctgaatgattcacccctgaaaaacttcagaatctatagcctggatatgaagaagagcttctttcagaggttcggcctggacaaatggagttccctcccagaaacacccacattacctgctttcttcttgggtagcttgtccatcagctccaccccttgtgacacctttctgaagctggagggctgggagaagggggttgtattcatcaatggccagaaccttggacgttactggaacattggaccccagaagacgctttacctcccaggtccctggttgagcagcggaatcaaccaggtcatcgtttttgaggagacgatggcgggccctgcattacagttcacggaaaccccccacctgggcaggaaccagtacattaagtgagcggtggcaccccctcctgctggtgccagtgggagactgccgcctcctcttgacctgaagcctggtggctgctgccccacccctcactgcaaaagcatctccttaagtagcaacctcagggactgggggctacagtctgcccctgtctcagctcaaaaccctaagcctgcagggaaaggtgggatggctctgggcctggctttgttgatgatggctttcctacagccctgctcttgtgccgaggctgtcgggctgtctctagggtgggagcagctaatcagatcgcccagcctttggccctcagaaaaagtgctgaaacgtgcccttgcaccggacgtcacagccctgcgagcatctgctggactcaggcgtgctctttgctggttcctgggaggcttggccacatccctcatggccccattttatccccgaaatcctgggtgtgtcaccagtgtagagggtggggaaggggtgtctcacctgagctgactttgttcttccttcacaaccttctgagccttctttgggattctggaaggaactcggcgtgagaaacatgtgacttcccctttcccttcccactcgctgcttcccacagggtgacaggctgggctggagaaacagaaatcctcaccctgcgtcttcccaagttagcaggtgtctctggtgttcagtgaggaggacatgtgagtcctggcagaagccatggcccatgtctgcacatccagggaggaggacagaaggcccagctcacatgtgagtcctggcagaagccatggcccatgtctgcacatccagggaggaggacagaaggcccagctcacatgtgagtcctggcagaagccatggcccatgtctgcacatccagggaggaggacagaaggcccagctcagtggcccccgccccccaccccccacgcccgaacagcaggggcagagcagccctccttcgaagtgtgtccaagtccgcatttgagccttgttctggggcccagcccaacacctggcttgggctcactgtcctgagttgcagtaaagctataaccttgaatcacaaaaaaaaaaaaaaaaaaaaaaaa

SEQ ID NO: 719 - DNA, 454 bp, Homo sapiens
ctcgttgcacacgctaccaggagcaggggcatggagcacagtgagggggctcccggagacccagccggtactgtggtaccccaggagctgctggaagagatgctttggttttttcgtgtggaagatgcatctccctggaatcattccatccttgccctggcagctgtggtggtcattataagcatggtcctcctgggaagaagcatccaggcaagcagaaaagaaacgatgcagccaccagaaaaagaaactccagaagtcctgcatttggatgaggccaaggatcacaacagcctaaacaacctaagagaaactttgctctcagaaaagccaaacttggcccaggtggaacttgagttaaaagagagagatgtgctgtcagttttccttccggatgtaccagaaactgagagctagtgagggttcagagaagccccatcctaagccagacaca

SEQ ID NO: 720 - DNA, 2349 bp, Homo sapiens
ccccgcccccccgcgcccgcggccccaagcggttcccgagcccaggcccgcgccgagcccaggtcctagagcagctccagcaggatggcggctccagcgtctctaaggcctgcagggggtccagccccatggggggcgccctaggcctccgacagctccccatctgtgctcctgcctgccggccatcctcaggccactcgccatgggcggctgcttctccaaacccaaaccagtggagctcaagatcgaggtggtgctgcctgagaaggagcgaggcaaggaggagctgtcggccagtgggaagggcagcccccgggcctaccagggcaatggcacggcccgccacttccacacggaggagcgcctgtccacccctcacccctaccccagccctcaggattgcgtggaggctgctgtctgccacgtcaaggacctcgagaatggccagatgcgggaagtggagctgggctgggggaaggtgttgctggtgaaggacaatggggagttccacgccctgggccataagtgtccgcactacggcgcacccctggtgaaaggcgttctgtcccgtggtcgggtgcgctgcccctggcacggcgcctgcttcaacatcagcactggggacctggaggacttccctggcctggacagtctacacaagttccaggtgaagattgagaaggagaaggtgtacgtccgggccagcaagcaggccctacagctgcagcgaaggaccaaggtgatggccaagtgtatctctccaagtgctgggtacagcagtagcaccaatgtgctcattgtgggtgcaggtgcagctggcctggtgtgtgcagagacactgcggcaggagggcttctccgaccggatcgtcctgtgcacgctagaccggcaccttccctacgaccgtcccaagctcagcaagtccctggacacacagcctgagcagctggccctgaggcccaaggagtttttccgagcctatggcatcgaggtgctcaccgaggctcaggtggtcacagtggacgtgagaactaagaaggtcgtgttcaaggatggcttcaagctggagtacagcaagctgctgctggcaccagggagcagccccaagactctgagctgcaaaggcaaagaagtggagaacgtgttcactatccggacgccagaggatgccaatcgcgtggtgaggctggcccgaggccgcaacgtggtcgtcgtgggagccggcttcctggggatggaggtggccgcttacctgacggagaaggcccactctgtgtctgtggtggagctggaggagacgcccttcaggaggttcctgggggagcgcgtgggtcgtgccctcatgaagatgtttgagaacaaccgggtgaagttctacatgcagacggaggtgtctgagctgcggggccaggagggaaagctgaaggaggttgtgctgaagagcagcaaggtcgtgcgggctgacgtctgcgtggtgggcattggtgcagtgcccgccacaggcttcctgaggcaaagcggcatcggtttggattcccgaggcttcatccctgtcaacaagatgatgcagaccaatgtcccaggcgtgtttgcagctggcgatgctgtcaccttcccccttgcctggaggaacaaccgcaaagtgaacattccacattggcagatggctcatgctcaggggcgcgtggcagcccagaacatgttggcgcaggaggcggagatgagcactgtgccctacctctggaccgccatgtttggcaagagcctgcgctacgcgggctacggagaaggcttcgacgacgtcatcatccagggggatctggaggagctgaagtttgtggctttctacactaaaggcgacgaggtgatcgccgtggccagcatgaactacgatcccattgtgtccaaggtcgctgaggtgctggcctcaggccgtgccatccggaagcgggaggtggagctgtttgtgctgcacagcaagactggcgacatgtcctggcttacggggaaaggatcctgagctcacatgcagtagacttgggcaggcaaagggggcaccaagggcacaggccaagccttgggggcaggtgccaatctccagtcccaggatcccccagggcagaacctgagccctcccagtgcttgccttcagccacctggctcccctcctgggaggcctctgctggatccagaagatgctcaaccctcaaggcctctgctgccactgacagctggcactggaggcaggacaagccctgcctcttctccctctattgggactggtcccctgaagaaccctgcaacatgttagacattaccgtaaaattaaaacgcacaaatttgcagatc

SEQ ID NO: 721 - DNA, 1865 bp, Homo sapiens
cgtctgcctggctgcggggtgacacggggcttcgccttgggaaggggtcgagggaagcagttagacggctgccgggcggcggctgccgcgcggcacacaatatttatttaattgcccaactaccactgatgaagatatattggagtgactgctgaaattgcctttttgtttttaaccagaggacagtccatttgtttcacttctttttgctttctttactgctatgagctttactgaacggctgaaaaacttggaaaataaaatggacatgctgtagtcttgaacataatttttttaaggaaaacttaaagtgccagagtgaaagccagaatggcatccagagagaggctctttgaactttggatgctttattgtacaaagaaagatccagattacctgaagctgtggttggacacttttgtttctagctatgaacaatttttagacgttgactttgaaaagctgcctaccagggtagatgatatgcctccaggaatatctctgcttcctgataatattctgcaggttctgaggatccagcttctacagtgtgttcagaaaatggcagatgggttagaggaacaacagcaagccttgtcaattttgcttgtcaagttcttcattattctttgcagaaatctatcaaatgtggaagaaattgggacttgctcgtacattaattatgtcatcaccatgacaacactctatattcagcaattaaaaagcaaaaaaaaagagaaggaaatggcagatcagacatgtattgaagaatttgtgatccacgcattggcattttgtgaaagcttatatgatccatatcggaattggagacatagaatttcaggacgaatccttagtactgtggaaaagagcagacagaaatataaaccagcttctctcacagtggaattcgtccctttcttttatcaatgttttcaggaaagtgaacatctcaaggaaagtcttaaatgttgcttattgcatctctttggagccattgtagccggtgggcagaggaatgctttgcaagcaatttctccagccactatggaagttcttatgcgagtattggcagattgtgattcctgggaggatggagatcctgaagaagtgggtaggaaggcagaactaactctgaagtgccttacagaagtggtacatatccttctcagtagcaactctgatcagcgtcaagtggaaaccagtactattctggagaactattttaaattgctaaattcagatcattcagctttacctaatcaaaggaggtccagacagtgggaaaaccgatttattgctctacagatcaaaatgctgaataccatcacagccatgttagattgtacagatagacctgttcttcaggccatttttcttaacagcaattgctttgaacatctcatacgactgctacagaactgcaaggtatttttctattattgttgttgtctttgattttaagaagctattttttgtttttgttttgattcacatttgaacatatttttactaatttttatacttaatctctgtttgcatttaattacataaccaagttttatcttgaattgaaactagtattaaatcacttgtaattgtctaaatactttaaaggtagtcaaactggaatttctttgtatgggaagaatttcagttcatgacatatattattttcattctatccagaaatatccttgaggccctttaagtaattagttgcttctgagctcttctaactatttgtgtctgaatatactaagatgagtctttgaaaaacaattgtttctcatggaaacactgtcttctaccacagtttgtagactccaagttacataccctgtaaatacaggccactgattata

SEQ ID NO: 722 - DNA, 2936 bp, Homo sapiens
cgtctgcctggctgcggggtgacacggggcttcgccttgggaaggggtcgagggaagcagttagacggctgccgggcggcggctgccgcgcggcacacaatatttatttaattgcccaactaccactgatgaagatatattggagtgactgctgaaattgcctttttgtttttaaccagaggacagtccatttgtttcacttctttttgctttccttactgctatgagctttactgaacggctgaaaaacttggaaaataaaatggacatgctgtagtcttgaacataatttttttaaggaaaacttaaagtgccagagtgaaagccagaatggcatccagagagaggctctttgaactttggatgctttattgtacaaagaaagatccagattacctgaagctgtggttggacacttttgtttctagctatgaacaatttttagacgttgactttgaaaagctgcctaccagggtagatgatatgcctccaggaatatctctgcttcctgataatattctgcaggttctgaggatccagcttctacagtgtgttcagaaaatggcagatgggttagaggaacaacagcaagccttgtcaattttgcttgtcaagttcttcattattctttgcagaaatctatcaaatgtggaagaaattgggacttgctcgtacattaattatgtcatcaccatgacaacactctatattcagcaattaaaaagcaaaaaaaaagagaaggaaatggcagatcagacatgtattgaagaatttgtgatccacgcattggcattttgtgaaagcttatatgatccatatcggaattggagacatagaatttcaggacgaatccttagtactgtggaaaagagcagacagaaatataaaccagcttctctcacagtggaattcgtccctttcttttatcaatgttttcaggaaagtgaacatctcaaggaaagtcttaaatgttgcttattgcatctctttggagccattgtagccggtgggcagaggaatgctttgcaagcaatttctccagccactatggaagttcttatgcgagtattggcagattgtgattcctgggaggatggagatcctgaagaagtgggtaggaaggcagaactaactctgaagtgccttacagaagtggtacatatccttctcagtagcaactctgatcagcgtcaagtggaaaccagtactattctggagaactattttaaattgctaaattcagatcattcagctttacctaatcaaaggaggtccagacagtgggaaaaccgatttattgctctacagatcaaaatgctgaataccatcacagccatgttagattgtacagatagacctgttcttcaggccatttttcttaacagcaattgctttgaacatctcatacgactgctacagaactgcaagtagagaccgggtttcaccatgttggccaggatggtctccatctcttgaccttgtgatctgcccacctcagcctcccaaagtgctgggattacaggcgtgagccaccgtgcctggccgagacatagctttttaattaaatgatttatctaaccaatatttattgtgtaccaattgtgtatcagacacttttcttttgaggtcacaaaatatatgttgtcttcataatgactactttataaattaggcacaaagtttcagagcgagagtttcagtttagttctttttgacttcatggccattattcctaacttttacaccatgtaatgacctaaatgatgattttgggtgtttatttccattcttctctccaaatatgtgatatgtttgtataatttaaataaaattcataaatgatttggtgccctttcagggtcaaataacattttttattacaattaaagtaatacatactcattgtaaatggaaacattgatagcatattgattctcccatacaataataaatatatgaattccaaaattgttgctcatagatgaaaactggtaataattcccatacttcctaatgtaaaaatatgtatttctgttaatgaaaaagtaagatcccacatcaagctgaataatatcaataggatacttttgtaaatatatttttgatagctcaaaatcatattataacattaatacaaacaaaattttgaagcaaccagctacttgatagcttttccattatcagtgttaactttttctgcagttgttcagaggctgtggaagttaatgcagatttgtagaaaccttaatatgtttgtaagtgaattttgcacaatgtacgattatattttgttgcaaaacaattttgatgccaaaatacgaaatatggagaacagacttcttgaaacattaaaaaaaaatttgtttctgaaatgtcaacacactcatcttcttttctaccttgatcttttttactgtgtatcactgtggccactcttcagtctttctggaatattaccctttctaaaaatactggcattccctgtttggttctaggctcttttttccaacctttcttaatttgcttatcctttggatgtctcacctttggatgtgtggctttagatatcatctataatacccaaatttcttgttgttagttcagctctcttgaggaattccacttgaatgtctctcaaaattttcaaatttgccacatctaaaatggaacagttcatcccctactctttagtctcccctttcttatcttatccctacagctgcttaaatcacccaggctggagtgaggtggtatgatctcagctcactgcaacctctgcctcctgggttcaagcgattctcctgcctcagccccccaaatagctgggattacaggtgcctgccaccatgcctggctaatctttgtatttttagtagagacagggtttcaccatgttggccaggttggtcttgaactcctgacctcaggtgattggc

SEQ ID NO: 723 - DNA, 775 bp, Homo sapiens
cgtctgcctggctgcggggtgacacggggcttcgccttgggaaggggtcgagggaagcagttagacggctgccgggcggcggctgccgcgcggcacacaatatttatttaattgcccaactaccactgatgaagatatattggagtgactgctgaaattgcctttttgtttttaaccagaggacagtccatttgtttcacttctttttgctttccttactgctatgagctttactgaacggctgaaaaacttggaaaataaaatggacatgctgtagtcttgaacataatttttttaaggaaaacttaaagtgccagagtgaaagccagaatggcatccagagagaggctctttgaactttggatgctttattgtacaaagaaagatccagattacctgaagctgtggttggacacttttgtttctagctatgaacaatttttagacgttgactttgaaaagctgcctaccagggtagatgatatgcctccaggaatatctctgcttcctgataatattctgcaggttctgaggatccagcttctacagtgtgttcagaaaatggcagatgggttagaggaacaacagcaagccttgtcaattttgcttgtcaagttcttcattattctttgcaggtatctagtagaaaaaataagctagttttcactcataggtgggagttgaacaatgagaacacatggagatgaggaggggaacatcacacactgggcctattggtgggtagggtgctaggagagggataacattaggagaa

SEQ ID NO: 724 - DNA, 1865 bp, Homo sapiens
cgtctgcctggctgcggggtgacacggggcttcgccttgggaaggggtcgagggaagcagttagacggctgccgggcggcggctgccgcgcggcacacaatatttatttaattgcccaactaccactgatgaagatatattggagtgactgctgaaattgcctttttgtttttaaccagaggacagtccatttgtttcacttctttttgctttccttactgctatgagctttactgaacggctgaaaaacttggaaaataaaatggacatgctgtagtcttgaacataatttttttaaggaaaacttaaagtgccagagtgaaagccagaatggcatccagagagaggctctttgaactttggatgctttattgtacaaagaaagatccagattacctgaagctgtggttggacacttttgtttctagctatgaacaatttttagacgttgactttgaaaagctgcctaccagggtagatgatatgcctccaggaatatctctgcttcctgataatattctgcaggttctgaggatccagcttctacagtgtgttcagaaaatggcagatgggttagaggaacaacagcaagccttgtcaattttgcttgtcaagttcttcattattctttgcagaaatctatcaaatgtggaagaaattgggacttgctcgtacattaattatgtcatcaccatgacaacactctatattcagcaattaaaaagcaaaaaaaaagagaaggaaatggcagatcagacatgtattgaagaatttgtgatccacgcattggcattttgtgaaagcttatatgatccatatcggaattggagacatagaatttcaggacgaatccttagtactgtggaaaagagcagacagaaatataaaccagcttctctcacagtggaattcgtccctttcttttatcaatgttttcaggaaagtgaacatctcaaggaaagtcttaaatgttgcttattgcatctctttggagccattgtagccggtgggcagaggaatgctttgcaagcaatttctccagccactatggaagttcttatgcgagtattggcagattgtgattcctgggaggatggagatcctgaagaagtgggtaggaaggcagaactaactctgaagtgccttacagaagtggtacatatccttctcagtagcaactctgatcagcgtcaagtggaaaccagtactattctggagaactattttaaattgctaaattcagatcattcagctttacctaatcaaaggaggtccagacagtgggaaaaccgatttattgctctacagatcaaaatgctgaataccatcacagccatgttagattgtacagatagacctgttcttcaggccatttttcttaacagcaattgctttgaacatctcatacgactgctacagaactgcaaggtatttttctattattgttgttgtctttgattttaagaagctattttttgtttttgttttgattcacatttgaacatatttttactaatttttatacttaatctctgtttgcatttaattacataaccaagttttatcttgaattgaaactagtattaaatcacttgtaattgtctaaatactttaaaggtagtcaaactggaatttctttgtatgggaagaatttcagttcatgacatatattattttcattctatccagaaatatccttgaggccctttaagtaattagttgcttctgagctcttctaactatttgtgtctgaatatactaagatgagtctttgaaaaacaattgtttctcatggaaacactgtcttctaccacagtttgtagactccaagttacataccctgtaaatacaggccactgattata

SEQ ID NO: 725 - DNA, 1124 bp, Homo sapiens
cgtctgcctggctgcggggtgacacggggcttcgccttgggaaggggtcgagggaagcagttagacggctgccgggcggcggctgccgcgcggcacacaatatttatttaattgcccaactaccactgatgaagatatattggagtgactgctgaaattgcctttttgtttttaaccagaggacagtccatttgtttcacttctttttgctttccttactgctatgagctttactgaacggctgaaaaacttggaaaataaaatggacatgctgtagtcttgaacataatttttttaaggaaaacttaaagtgccagagtgaaagccagaatggcatccagagagaggctctttgaactttggatgctttattgtacaaagaaagatccagattacctgaagctgtggttggacacttttgtttctagctatgaacaatttttagacgttgactttgaaaagctgcctaccagggtagatgatatgcctccaggaatatctctgcttcctgataatattctgcaggttctgaggatccagcttctacagtgtgttcagaaaatggcagatgggttagaggaacaacagcaagccttgtcaattttgcttgtcaagttcttcattattctttgcagaaatctatcaaatgtggaagaaattgggacttgctcgtacattaattatgtcatcaccatgacaacactctatattcagcaattaaaaagcaaaaaaaaagagaaggaaatggcagatcagacatgtattgaagaatttgtgatccacgcattggcattttgtgaaagcttatatgatccatatcggaattggagacatagaatttcaggaagccaaattcctgaaggtttcctgcgtcacatctctataagagtttcttctgggaaaaatccagcaacgcccactcctgaggggtgaaggttacagccacatcctcaaaagtcactgagtccatgttccagcttccagcatgctccagcatcctgcccagggatcttgcagggcctgcaggtcacaggcaacagaggctgccccagaaccacctaaggcctctcagagctgaggagagggagcccaagctaggagcgcagcccagagacccaaaaaga

SEQ ID NO: 726 - DNA, 2936 bp, Homo sapiens
cgtctgcctggctgcggggtgacacggggcttcgccttgggaaggggtcgagggaagcagttagacggctgccgggcggcggctgccgcgcggcacacaatatttatttaattgcccaactaccactgatgaagatatattggagtgactgctgaaattgcctttttgtttttaaccagaggacagtccatttgtttcacttctttttgctttctttactgctatgagctttactgaacggctgaaaaacttggaaaataaaatggacatgctgtagtcttgaacataatttttttaaggaaaacttaaagtgccagagtgaaagccagaatggcatccagagagaggctctttgaactttggatgctttattgtacaaagaaagatccagattacctgaagctgtggttggacacttttgtttctagctatgaacaatttttagacgttgactttgaaaagctgcctaccagggtagatgatatgcctccaggaatatctctgcttcctgataatattctgcaggttctgaggatccagcttctacagtgtgttcagaaaatggcagatgggttagaggaacaacagcaagccttgtcaattttgcttgtcaagttcttcattattctttgcagaaatctatcaaatgtggaagaaattgggacttgctcgtacattaattatgtcatcaccatgacaacactctatattcagcaattaaaaagcaaaaaaaaagagaaggaaatggcagatcagacatgtattgaagaatttgtgatccacgcattggcattttgtgaaagcttatatgatccatatcggaattggagacatagaatttcaggacgaatccttagtactgtggaaaagagcagacagaaatataaaccagcttctctcacagtggaattcgtccctttcttttatcaatgttttcaggaaagtgaacatctcaaggaaagtcttaaatgttgcttattgcatctctttggagccattgtagccggtgggcagaggaatgctttgcaagcaatttctccagccactatggaagttcttatgcgagtattggcagattgtgattcctgggaggatggagatcctgaagaagtgggtaggaaggcagaactaactctgaagtgccttacagaagtggtacatatccttctcagtagcaactctgatcagcgtcaagtggaaaccagtactattctggagaactattttaaattgctaaattcagatcattcagctttacctaatcaaaggaggtccagacagtgggaaaaccgatttattgctctacagatcaaaatgctgaataccatcacagccatgttagattgtacagatagacctgttcttcaggccatttttcttaacagcaattgctttgaacatctcatacgactgctacagaactgcaagtagagaccgggtttcaccatgttggccaggatggtctccatctcttgaccttgtgatctgcccacctcagcctcccaaagtgctgggattacaggcgtgagccaccgtgcctggccgagacatagctttttaattaaatgatttatctaaccaatatttattgtgtaccaattgtgtatcagacacttttcttttgaggtcacaaaatatatgttgtcttcataatgactactttataaattaggcacaaagtttcagagcgagagtttcagtttagttctttttgacttcatggccattattcctaacttttacaccatgtaatgacctaaatgatgattttgggtgtttatttccattcttctctccaaatatgtgatatgtttgtataatttaaataaaattcataaatgatttggtgccctttcagggtcaaataacattttttattacaattaaagtaatacatactcattgtaaatggaaacattgatagcatattgattctcccatacaataataaatatatgaattccaaaattgttgctcatagatgaaaactggtaataattcccatacttcctaatgtaaaaatatgtatttctgttaatgaaaaagtaagatcccacatcaagctgaataatatcaataggatacttttgtaaatatatttttgatagctcaaaatcatattataacattaatacaaacaaaattttgaagcaaccagctacttgatagcttttccattatcagtgttaactttttctgcagttgttcagaggctgtggaagttaatgcagatttgtagaaaccttaatatgtttgtaagtgaattttgcacaatgtacgattatattttgttgcaaaacaattttgatgccaaaatacgaaatatggagaacagacttcttgaaacattaaaaaaaaatttgtttctgaaatgtcaacacactcatcttcttttctaccttgatcttttttactgtgtatcactgtggccactcttcagtctttctggaatattaccctttctaaaaatactggcattccctgtttggttctaggctcttttttccaacctttcttaatttgcttatcctttggatgtctcacctttggatgtgtggctttagatatcatctataatacccaaatttcttgttgttagttcagctctcttgaggaattccacttgaatgtctctcaaaattttcaaatttgccacatctaaaatggaacagttcatcccctactctttagtctcccctttcttatcttatccctacagctgcttaaatcacccaggctggagtgaggtggtatgatctcagctcactgcaacctctgcctcctgggttcaagcgattctcctgcctcagccccccaaatagctgggattacaggtgcctgccaccatgcctggctaatctttgtatttttagtagagacagggtttcaccatgttggccaggttggtcttgaactcctgacctcaggtgattggc

SEQ ID NO: 727 - DNA, 1124 bp, Homo sapiens
cgtctgcctggctgcggggtgacacggggcttcgccttgggaaggggtcgagggaagcagttagacggctgccgggcggcggctgccgcgcggcacacaatatttatttaattgcccaactaccactgatgaagatatattggagtgactgctgaaattgcctttttgtttttaaccagaggacagtccatttgtttcacttctttttgctttctttactgctatgagctttactgaacggctgaaaaacttggaaaataaaatggacatgctgtagtcttgaacataatttttttaaggaaaacttaaagtgccagagtgaaagccagaatggcatccagagagaggctctttgaactttggatgctttattgtacaaagaaagatccagattacctgaagctgtggttggacacttttgtttctagctatgaacaatttttagacgttgactttgaaaagctgcctaccagggtagatgatatgcctccaggaatatctctgcttcctgataatattctgcaggttctgaggatccagcttctacagtgtgttcagaaaatggcagatgggttagaggaacaacagcaagccttgtcaattttgcttgtcaagttcttcattattctttgcagaaatctatcaaatgtggaagaaattgggacttgctcgtacattaattatgtcatcaccatgacaacactctatattcagcaattaaaaagcaaaaaaaaagagaaggaaatggcagatcagacatgtattgaagaatttgtgatccacgcattggcattttgtgaaagcttatatgatccatatcggaattggagacatagaatttcaggaagccaaattcctgaaggtttcctgcgtcacatctctataagagtttcttctgggaaaaatccagcaacgcccactcctgaggggtgaaggttacagccacatcctcaaaagtcactgagtccatgttccagcttccagcatgctccagcatcctgcccagggatcttgcagggcctgcaggtcacaggcaacagaggctgccccagaaccacctaaggcctctcagagctgaggagagggagcccaagctaggagcgcagcccagagacccaaaaaga

SEQ ID NO: 728 - DNA, 775 bp, Homo sapiens
cgtctgcctggctgcggggtgacacggggcttcgccttgggaaggggtcgagggaagcagttagacggctgccgggcggcggctgccgcgcggcacacaatatttatttaattgcccaactaccactgatgaagatatattggagtgactgctgaaattgcctttttgtttttaaccagaggacagtccatttgtttcacttctttttgctttctttactgctatgagctttactgaacggctgaaaaacttggaaaataaaatggacatgctgtagtcttgaacataatttttttaaggaaaacttaaagtgccagagtgaaagccagaatggcatccagagagaggctctttgaactttggatgctttattgtacaaagaaagatccagattacctgaagctgtggttggacacttttgtttctagctatgaacaatttttagacgttgactttgaaaagctgcctaccagggtagatgatatgcctccaggaatatctctgcttcctgataatattctgcaggttctgaggatccagcttctacagtgtgttcagaaaatggcagatgggttagaggaacaacagcaagccttgtcaattttgcttgtcaagttcttcattattctttgcaggtatctagtagaaaaaataagctagttttcactcataggtgggagttgaacaatgagaacacatggagatgaggaggggaacatcacacactgggcctattggtgggtagggtgctaggagagggataacattaggagaa

SEQ ID NO: 729 - DNA, 2895 bp, Homo sapiens
cattctaagagctttgatgtatttgaaatgtctgagatgtgggccttttccttgtatctgtacaaaagatttatttaattgcccaactaccactgatgaagatatattggagtgactgctgaaattgcctttttgtttttaaccagaggacagtccatttgtttcacttctttttgctttccttactgctatgagctttactgaacggctgaaaaacttggaaaataaaatggacatgctgtagtcttgaacataatttttttaaggaaaacttaaagtgccagagtgaaagccagaatggcatccagagagaggctctttgaactttggatgctttattaaagatccagattacctgaagctgtggttggacacttttgtttctagctatgaacaatttttagacgttgactttgaaaagctgcctaccagggtagatgatatgcctccaggaatatctctgcttcctgataatattctgcaggttctgaggatccagcttctacagtgtgttcagaaaatggcagatgggttagaggaacaacagcaagccttgtcaattttgcttgtcaagttcttcattattctttgcagaaatctatcaaatgtggaagaaattgggacttgctcgtacattaattatgtcatcaccatgacaacactctatattcagcaattaaaaagcaaaaaaaaagagaaggaaatggcagatcagacatgtattgaagaatttgtgatccacgcattggcattttgtgaaagcttatatgatccatatcggaattggagacatagaatttcaggacgaatccttagtactgtggaaaagagcagacagaaatataaaccagcttctctcacagtggaattcgtccctttcttttatcaatgttttcaggaaagtgaacatctcaaggaaagtcttaaatgttgcttattgcatctctttggagccattgtagccggtgggcagaggaatgctttgcaagcaatttctccagccactatggaagttcttatgcgagtattggcagattgtgattcctgggaggatggagatcctgaagaagtgggtaggaaggcagaactaactctgaagtgccttacagaagtggtacatatccttctcagtagcaactctgatcagcgtcaagtggaaaccagtactattctggagaactattttaaattgctaaattcagatcattcagctttacctaatcaaaggaggtccagacagtgggaaaaccgatttattgctctacagatcaaaatgctgaataccatcacagccatgttagattgtacagatagacctgttcttcaggccatttttcttaacagcaattgctttgaacatctcatacgactgctacagaactgcaagtagagaccgggtttcaccatgttggccaggatggtctccatctcttgaccttgtgatctgcccacctcagcctcccaaagtgctgggattacaggcgtgagccaccgtgcctggccgagacatagctttttaattaaatgatttatctaaccaatatttattgtgtaccaattgtgtatcagacacttttcttttgaggtcacaaaatatatgttgtcttcataatgactactttataaattaggcacaaagtttcagagcgagagtttcagtttagttctttttgacttcatggccattattcctaacttttacaccatgtaatgacctaaatgatgattttgggtgtttatttccattcttctctccaaatatgtgatatgtttgtataatttaaataaaattcataaatgatttggtgccctttcagggtcaaataacattttttattacaattaaagtaatacatactcattgtaaatggaaacattgatagcatattgattctcccatacaataataaatatatgaattccaaaattgttgctcatagatgaaaactggtaataattcccatacttcctaatgtaaaaatatgtatttctgttaatgaaaaagtaagatcccacatcaagctgaataatatcaataggatacttttgtaaatatatttttgatagctcaaaatcatattataacattaatacaaacaaaattttgaagcaaccagctacttgatagcttttccattatcagtgttaactttttctgcagttgttcagaggctgtggaagttaatgcagatttgtagaaaccttaatatgtttgtaagtgaattttgcacaatgtacgattatattttgttgcaaaacaattttgatgccaaaatacgaaatatggagaacagacttcttgaaacattaaaaaaaaatttgtttctgaaatgtcaacacactcatcttcttttctaccttgatcttttttactgtgtatcactgtggccactcttcagtctttctggaatattaccctttctaaaaatactggcattccctgtttggttctaggctcttttttccaacctttcttaatttgcttatcctttggatgtctcacctttggatgtgtggctttagatatcatctataatacccaaatttcttgttgttagttcagctctcttgaggaattccacttgaatgtctctcaaaattttcaaatttgccacatctaaaatggaacagttcatcccctactctttagtctcccctttcttatcttatccctacagctgcttaaatcacccaggctggagtgaggtggtatgatctcagctcactgcaacctctgcctcctgggttcaagcgattctcctgcctcagccccccaaatagctgggattacaggtgcctgccaccatgcctggctaatctttgtatttttagtagagacagggtttcaccatgttggccaggttggtcttgaactcctgacctcaggtgattggc

SEQ ID NO: 730 - DNA, 2895 bp, Homo sapiens
cattctaagagctttgatgtatttgaaatgtctgagatgtgggccttttccttgtatctgtacaaaagatttatttaattgcccaactaccactgatgaagatatattggagtgactgctgaaattgcctttttgtttttaaccagaggacagtccatttgtttcacttctttttgctttctttactgctatgagctttactgaacggctgaaaaacttggaaaataaaatggacatgctgtagtcttgaacataatttttttaaggaaaacttaaagtgccagagtgaaagccagaatggcatccagagagaggctctttgaactttggatgctttattaaagatccagattacctgaagctgtggttggacacttttgtttctagctatgaacaatttttagacgttgactttgaaaagctgcctaccagggtagatgatatgcctccaggaatatctctgcttcctgataatattctgcaggttctgaggatccagcttctacagtgtgttcagaaaatggcagatgggttagaggaacaacagcaagccttgtcaattttgcttgtcaagttcttcattattctttgcagaaatctatcaaatgtggaagaaattgggacttgctcgtacattaattatgtcatcaccatgacaacactctatattcagcaattaaaaagcaaaaaaaaagagaaggaaatggcagatcagacatgtattgaagaatttgtgatccacgcattggcattttgtgaaagcttatatgatccatatcggaattggagacatagaatttcaggacgaatccttagtactgtggaaaagagcagacagaaatataaaccagcttctctcacagtggaattcgtccctttcttttatcaatgttttcaggaaagtgaacatctcaaggaaagtcttaaatgttgcttattgcatctctttggagccattgtagccggtgggcagaggaatgctttgcaagcaatttctccagccactatggaagttcttatgcgagtattggcagattgtgattcctgggaggatggagatcctgaagaagtgggtaggaaggcagaactaactctgaagtgccttacagaagtggtacatatccttctcagtagcaactctgatcagcgtcaagtggaaaccagtactattctggagaactattttaaattgctaaattcagatcattcagctttacctaatcaaaggaggtccagacagtgggaaaaccgatttattgctctacagatcaaaatgctgaataccatcacagccatgttagattgtacagatagacctgttcttcaggccatttttcttaacagcaattgctttgaacatctcatacgactgctacagaactgcaagtagagaccgggtttcaccatgttggccaggatggtctccatctcttgaccttgtgatctgcccacctcagcctcccaaagtgctgggattacaggcgtgagccaccgtgcctggccgagacatagctttttaattaaatgatttatctaaccaatatttattgtgtaccaattgtgtatcagacacttttcttttgaggtcacaaaatatatgttgtcttcataatgactactttataaattaggcacaaagtttcagagcgagagtttcagtttagttctttttgacttcatggccattattcctaacttttacaccatgtaatgacctaaatgatgattttgggtgtttatttccattcttctctccaaatatgtgatatgtttgtataatttaaataaaattcataaatgatttggtgccctttcagggtcaaataacattttttattacaattaaagtaatacatactcattgtaaatggaaacattgatagcatattgattctcccatacaataataaatatatgaattccaaaattgttgctcatagatgaaaactggtaataattcccatacttcctaatgtaaaaatatgtatttctgttaatgaaaaagtaagatcccacatcaagctgaataatatcaataggatacttttgtaaatatatttttgatagctcaaaatcatattataacattaatacaaacaaaattttgaagcaaccagctacttgatagcttttccattatcagtgttaactttttctgcagttgttcagaggctgtggaagttaatgcagatttgtagaaaccttaatatgtttgtaagtgaattttgcacaatgtacgattatattttgttgcaaaacaattttgatgccaaaatacgaaatatggagaacagacttcttgaaacattaaaaaaaaatttgtttctgaaatgtcaacacactcatcttcttttctaccttgatcttttttactgtgtatcactgtggccactcttcagtctttctggaatattaccctttctaaaaatactggcattccctgtttggttctaggctcttttttccaacctttcttaatttgcttatcctttggatgtctcacctttggatgtgtggctttagatatcatctataatacccaaatttcttgttgttagttcagctctcttgaggaattccacttgaatgtctctcaaaattttcaaatttgccacatctaaaatggaacagttcatcccctactctttagtctcccctttcttatcttatccctacagctgcttaaatcacccaggctggagtgaggtggtatgatctcagctcactgcaacctctgcctcctgggttcaagcgattctcctgcctcagccccccaaatagctgggattacaggtgcctgccaccatgcctggctaatctttgtatttttagtagagacagggtttcaccatgttggccaggttggtcttgaactcctgacctcaggtgattggc

SEQ ID NO: 731 - DNA, 1244 bp, Homo sapiens
atggcctgccactcagtccacgggcaggagcaacggggagatcccacaagcaaagtgaactgggggatgggctgaacgggctccaggcaactgagccctactggcaggtcctcggcctgggcccgaacaggaaggaggggcacagagtgcccaggtaaccgctcctgggagcagtggggaaccgtcggttgcttgaactctcgagagctgggctctgagcgtcctcgtccagccgccaactcggccaacggctaagccagcagtttcttctgttgccgggcaacgcgccttttaaacctgagggagcgggcgcgtgagcacatcacggcgcccgtgacagagcgagcttaacggattaataagcgcagccaggccagctctggggtctcagcaggtggtccgcaacatgacctctgagttcttcgctgcccagctccggtcccagatctctgaccacaccactcacccgatctcctactacaagcccgagttctacacgccggatgacgggggcactgctcacctgtctgtcgtcgcagaggacggcagtgctgtgtccgccaccagcaccatcaacctctactttggctccaaggtctgctccccggtcagtgggatcctgttcaataatgaatggacgacttcagctctcccagcattcaccaatgagtttggggcacccccctcacctgccaatttcatccagccagggaagcagccgctcttgtccatgtgcctgacgatcatggtgggccaggacggccaggtccggatggtggtgggagctgctgggggcacgcagatcaccacagacactgcactggccatcatctacaacctctggttcggctatgacgtgaagagggccgtggaggagccccggctgcacaacaagcttctgcccaacgtcacgacagtggagagaaacattgaccaggcagtgactgcagccctggagacccggcaccatcacacccagatcgcgtccaccttcatcgctgtggtgcaagccatcgtccgcacggctggtggctgggcagctgcctcggactccaggaaaggcggggaacctgctggctactgattgctccaggcagacaaggctgacaagcaatccagggacaagatactcaccaggatgaggaagaggactttgggggacgggcttcccctgtgagcagcagagcagcataataaatgaggccactgtgccaggctccaggtggcctccctggcctgtctcc

SEQ ID NO: 732 - DNA, 1201 bp, Homo sapiens
caagtgaggtgctgccgtcatccaggctggacagttcagtgatttgcctgaggccccacagcaggagaacgagaaggctgcctgatcagagagtctctgaagaagattctgtggctacaggcttcagcagagtgtgagggagaccccggttatttcctcagctgtttccaccaaatcctcctgtctttcgtggccaacaccccaggcaaggcttggggcccccgtctgctgctggacgagccatgaagaagaagttagtggtgctgggcctgctggccgtggtcctggtgctggtcattgtcggcctctgtctctggctgccctcggcctccaaggaacctgacaaccatgagactgaagccagctctggggtctcagcaggtggtccgcaacatgacctctgagttcttcgctgcccagctccggtcccagatctctgaccacaccactcacccgatctcctactacaagcccgagttctacacgccggatgacgggggcactgctcacctgtctgtcgtcgcagaggacggcagtgctgtgtccgccaccagcaccatcaacctctatgggatcctgttcaataatgaatggacgacttcagctctcccagcattcaccaatgagtttggggcacccccctcacctgccaatttcatccagccagggaagcagccgctcttgtccatgtgcctgacgatcatggtgggccaggacggccaggtccggatggtggtgggagctgctgggggcacgcagatcaccacagacactgcactggccatcatctacaacctctggttcggctatgacgtgaagagggccgtggaggagccccggctgcacaacaagcttctgcccaacgtcacgacagtggagagaaacattgaccaggcagtgactgcagccctggagacccggcaccatcacacccagatcgcgtccaccttcatcgctgtggtgcaagccatcgtccgcacggctggtggctgggcagctgcctcggactccaggaaaggcggggaacctgctggctactgattgctccaggcagacaaggctgacaagcaatccagggacaagatactcaccaggatgaggaagaggactttgggggacgggcttcccctgtgagcagcagagcagcataataaatgaggccactgtgccaggctccaggtggcctccctggcctgtctcc

SEQ ID NO: 733 - DNA, 2626 bp, Homo sapiens
ccaagcctggggaggtggccacccttccacgatggcatttggatgttccctgtgtgtggggagggcacggggactccattcgtagaccacctctgggacagtgtgtctgcctctgaggtcagatgctctgcactgggacagcgtggagtggagggaaaccaagcttggggctcattggaggggcttgctggcagacaccgccctttgtgggaaactgactgtgggagaggggaaccccaacctctgtcaccacatccctcttccctgttgtcacacctgtcacctgctgccgtagccatgagacttcccaagggtcactgctgccactcactgcacagcctggaagggagtccacaggggacatacagtgagcaagagacctgtgccactcaggcctcctgggggtgtccccagtgcagccatgatgataatcacagctaccattcaccaagccctgcccacagtctaacctactctattcacaacactcccagcagcaaggcaagtgaggtgctgccgtcatccaggctggacagttcagtgatttgcctgaggccccacagcagagttcaactggagacagagaaaccagctagaggcagagggaggtaacacggagtcccccagaaaggtctgggctgtgcgtgcttcagctgtttccaccaaatcctcctgtctttcgtggccaacaccccaggcaaggcttggggcccccgtctgctgctggacgcagagccatgaagaagaagttagtggtgctgggcctgctggccgtggtcctggtgctggtcattgtcggcctctgtctctggctgccctcggcctccaaggaacctgacaaccatgtgtacaccagggctgccatggccgcggatgccaagcagtgcttggagattgggagggacacactgcgggacggtggctctgcagtggatgcagccattgcagccctgttgtgtgtggggctcatgaatgcccacagcatgggcatcggggttggcctcttcctcaccatctacaacagcaccacaggaaaagctgaggtcatcaatgcccgcgaggtggcccccaggctggcctttgccagcatgttcaacagctcggagcagtcccagaagggagggctgtcggtggcggtgcctggggagatccgaggctatgagctggcacaccagcggcatgggcggctgccctgggctcgcctcttccagcccagcatccagctggcccgccagggcttccctgtgggcaagggcttggcggcagtcctggaaaacaagcggactgtcatcgagcagcagcctgtcttgtggtatgtgttctgccgggatagaaaggtgcttcgggagggggagagactgaccctgccgcggctggctgacacctatgagatgctggccatcgagggtgcccaggccttctacaacggcagcctcatggcccagattgtgaaggacatccaggcggctgggggcattgtgacagctgaggacctgaacaactaccgtgctgagctgatcgagcacccgctgaacatcagcctgggagacgcggtgctgtacatgcccagtgcgcggctcagcgggcccgtgctggccctcatcctcaacatcctcaaagggtacaacttctcccgggagagcgtggagacccccgagcagaagggcctgacgtaccaccgcatcgtagaggctttccggtttgcctacgccaagaggaccctgcttggggaccccaagtttgtggatgtgactgaggccagctctggggtctcagcaggtggtccgcaacatgacctctgagttcttcgctgcccagctccggtcccagatctctgaccacaccactcacccgatctcctactacaagcccgagttctacacgccggatgacgggggcactgctcacctgtctgtcgtcgcagaggacggcagtgctgtgtccgccaccagcaccatcaacctctactttggctccaaggtctgctccccggtcagtgggatcctgttcaataatgaatggacgacttcagctctcccagcattcaccaatgagtttggggcacccccctcacctgccaatttcatccagccagggaagcagccgctcttgtccatgtgcctgacgatcatggtgggccaggacggccaggtccggatggtggtgggagctgctgggggcacgcagatcaccacagacactgcactggccatcatctacaacctctggttcggctatgacgtgaagagggccgtggaggagccccggctgcacaacaagcttctgcccaacgtcacgacagtggagagaaacattgaccaggcagtgactgcagccctggagacccggcaccatcacacccagatcgcgtccaccttcatcgctgtggtgcaagccatcgtccgcacggctggtggctgggcagctgcctcggactccaggaaaggcggggaacctgctggctactgattgctccaggcagacaaggctgacaagcaatccagggacaagatactcaccaggatgaggaagaggactttgggggacgggcttcccctgtgagcagcagagcagcataataaatgaggccactgtgccaggctccaggtggcctccctggcctgtc

SEQ ID NO: 734 - DNA, 1317 bp, Homo sapiens
gctggacagttcagtgatttgcctgaggccccacagcagagttcaactggagacagagaaaccagctagaggcagagggaggtaacacggagtcccccagaaaggtctgggctgtgcgtgcttcaggtaacctcccttgaccttcaggagaacgagaaggctgcctgatcagagagtctctgaagaagattctgtggctacaggcttcagcagagtgtgagggagaccccggttatttcctcagctgtttccaccaaatcctcctgtctttcgtggccaacaccccaggcaaggcttggggcccccgtctgctgctggacgcagagccatgaagaagaagttagtggtgctgggcctgctggccgtggtcctggtgctggtcattgtcggcctctgtctctggctgccctcggcctccaaggaacctgacaaccatgagactgaagccagctctggggtctcagcaggtggtccgcaacatgacctctgagttcttcgctgcccagctccggtcccagatctctgaccacaccactcacccgatctcctactacaagcccgagttctacacgccggatgacgggggcactgctcacctgtctgtcgtcgcagaggacggcagtgctgtgtccgccaccagcaccatcaacctctactttggctccaaggtctgctccccggtcagtgggatcctgttcaataatgaatggacgacttcagctctcccagcattcaccaatgagtttggggcacccccctcacctgccaatttcatccagccagggaagcagccgctcttgtccatgtgcctgacgatcatggtgggccaggacggccaggtccggatggtggtgggagctgctgggggcacgcagatcaccacagacactgcactggccatcatctacaacctctggttcggctatgacgtgaagagggccgtggaggagccccggctgcacaacaagcttctgcccaacgtcacgacagtggagagaaacattgaccaggcagtgactgcagccctggagacccggcaccatcacacccagatcgcgtccaccttcatcgctgtggtgcaagccatcgtccgcacggctggtggctgggcagctgcctcggactccaggaaaggcggggaacctgctggctactgattgctccaggcagacaaggctgacaagcaatccagggacaagatactcaccaggatgaggaagaggactttgggggacgggcttcccctgtgagcagcagagcagcataataaatgaggccactgtgccaggctccaggtggcctccctggcctgtctcc

SEQ ID NO: 735 - DNA, 2112 bp, Homo sapiens
caagtgaggtgctgccgtcatccaggctggacagttcagtgatttgcctgaggccccacagcaggagaacgagaaggctgcctgatcagagagtctctgaagaagattctgtggctacaggcttcagcagagtgtgagggagaccccggttatttcctcagctgtttccaccaaatcctcctgtctttcgtggccaacaccccaggcaaggcttggggcccccgtctgctgctggacgagccatgaagaagaagttagtggtgctgggcctgctggccgtggtcctggtgctggtcattgtcggcctctgtctctggctgccctcggcctccaaggaacctgacaaccatgtgtacaccagggctgccatggccgcggatgccaagcagtgcttggagattgggagggacacactgcgggacggtggctctgcagtggatgcagccattgcagccctgttgtgtgtggggctcatgaatgcccacagcatgggcatcggggttggcctcttcctcaccatctacaacagcaccacaggaaaagctgaggtcatcaatgcccgcgaggtggcccccaggctggcctttgccagcatgttcaacagctcggagcagtcccagaagggagggctgtcggtggcggtgcctggggagatccgaggctatgagctggcacaccagcggcatgggcggctgccctgggctcgcctcttccagcccagcatccagctggcccgccagggcttccctgtgggcaagggcttggcggcagtcctggaaaacaagcggactgtcatcgagcagcagcctgtcttgtggtatgtgttctgccgggatagaaaggtgcttcgggagggggagagactgaccctgccgcggctggctgacacctatgagatgctggccatcgagggtgcccaggccttctacaacggcagcctcatggcccagattgtgaaggacatccaggcggctgggggcattgtgacagctgaggacctgaacaactaccgtgctgagctgatcgagcacccgctgaacatcagcctgggagacgcggtgctgtacatgcccagtgcgcggctcagcgggcccgtgctggccctcatcctcaacatcctcaaagggtacaacttctcccgggagagcgtggagacccccgagcagaagggcctgacgtaccaccgcatcgtagaggctttccggtttgcctacgccaagaggaccctgcttggggaccccaagtttgtggatgtgactgaggtggtccgcaacatgacctctgagttcttcgctgcccagctccggtcccagatctctgaccacaccactcacccgatctcctactacaagcccgagttctacacgccggatgacgggggcactgctcacctgtctgtcgtcgcagaggacggcagtgctgtgtccgccaccagcaccatcaacctctactttggctccaaggtctgctccccggtcagtgggatcctgttcaataatgaatggacgacttcagctctcccagcattcaccaatgagtttggggcacccccctcacctgccaatttcatccagccagggaagcagccgctcttgtccatgtgcctgacgatcatggtgggccaggacggccaggtccggatggtggtgggagctgctgggggcacgcagatcaccacagacactgcactggccatcatctacaacctctggttcggctatgacgtgaagagggccgtggaggagccccggctgcacaacaagcttctgcccaacgtcacgacagtggagagaaacattgaccaggcagtgactgcagccctggagacccggcaccatcacacccagatcgcgtccaccttcatcgctgtggtgcaagccatcgtccgcacggctggtggctgggcagctgcctcggactccaggaaaggcggggaacctgctggctactgattgctccaggcagacaaggctgacaagcaatccagggacaagatactcaccaggatgaggaagaggactttgggggacgggcttcccctgtgagcagcagagcagcataataaatgaggccactgtgccaggctccaggtggcctccctggcctgtctcc

SEQ ID NO: 736 - DNA, 1184 bp, Homo sapiens
aaaggtctgggctgtgcgtgcttcaggtaacctcccttgaccttcaggagaacgagaaggctgcctgatcagagagtctctgaagaagattctgtggctacaggcttcagcagagtgtgagggagaccccggttatttcctcagctgtttccaccaaatcctcctgtctttcgtggccaacaccccaggcaaggcttggggcccccgtctgctgctggacgagccatgaagaagaagttagtggtgctgggcctgctggccgtggtcctggtgctggtcattgtcggcctctgtctctggctgccctcggcctccaaggaacctgacaaccatgagactgaagccagctctggggtctcagcaggtggtccgcaacatgacctctgagttcttcgctgcccagctccggtcccagatctctgaccacaccactcacccgatctcctactacaagcccgagttctacacgccggatgacgggggcactgctcacctgtctgtcgtcgcagaggacggcagtgctgtgtccgccaccagcaccatcaacctctatgggatcctgttcaataatgaatggacgacttcagctctcccagcattcaccaatgagtttggggcacccccctcacctgccaatttcatccagccagggaagcagccgctcttgtccatgtgcctgacgatcatggtgggccaggacggccaggtccggatggtggtgggagctgctgggggcacgcagatcaccacagacactgcactggccatcatctacaacctctggttcggctatgacgtgaagagggccgtggaggagccccggctgcacaacaagcttctgcccaacgtcacgacagtggagagaaacattgaccaggcagtgactgcagccctggagacccggcaccatcacacccagatcgcgtccaccttcatcgctgtggtgcaagccatcgtccgcacggctggtggctgggcagctgcctcggactccaggaaaggcggggaacctgctggctactgattgctccaggcagacaaggctgacaagcaatccagggacaagatactcaccaggatgaggaagaggactttgggggacgggcttcccctgtgagcagcagagcagcataataaatgaggccactgtgccaggctccaggtggcctccctggcctgtctcc

SEQ ID NO: 737 - DNA, 1296 bp, Homo sapiens
gctggacagttcagtgatttgcctgaggccccacagcagagttcaactggagacagagaaaccagctagaggcagagggaggtaacacggagtcccccagaaaggtctgggctgtgcgtgcttcaggtaacctcccttgaccttcaggagaacgagaaggctgcctgatcagagagtctctgaagaagattctgtggctacaggcttcagcagagtgtgagggagaccccggttatttcctcagctgtttccaccaaatcctcctgtctttcgtggccaacaccccaggcaaggcttggggcccccgtctgctgctggacgcagagccatgaagaagaagttagtggtgctgggcctgctggccgtggtcctggtgctggtcattgtcggcctctgtctctggctgccctcggcctccaaggaacctgacaaccatgagactgaagccagctctggggtctcagcaggtggtccgcaacatgacctctgagttcttcgctgcccagctccggtcccagatctctgaccacaccactcacccgatctcctactacaagcccgagttctacacgccggatgacgggggcactgctcacctgtctgtcgtcgcagaggacggcagtgctgtgtccgccaccagcaccatcaacctctactttggctccaaggtctgctccccggtcagtgggatcctgttcaataatgaatggacgacttcagctctcccagcattcaccaatgagtttggggcacccccctcacctgccaatttcatccagccagggaagcagccgctcttgtccatgtgcctgacgatcatggtgggccaggacggccagcccccaagccaccctgatcacactcccatgccccaggccatcatctacaacctctggttcggctatgacgtgaagagggccgtggaggagccccggctgcacaacaagcttctgcccaacgtcacgacagtggagagaaacattgaccaggcagtgactgcagccctggagacccggcaccatcacacccagatcgcgtccaccttcatcgctgtggtgcaagccatcgtccgcacggctggtggctgggcagctgcctcggactccaggaaaggcggggaacctgctggctactgattgctccaggcagacaaggctgacaagcaatccagggacaagatactcaccaggatgaggaagaggactttgggggacgggcttcccctgtgagcagcagagcagcataataaatgaggccactgtgccaggctccaggtggcctccctggcctgtctcc

SEQ ID NO: 738 - DNA, 2095 bp, Homo sapiens
aaaggtctgggctgtgcgtgcttcaggtaacctcccttgaccttcaggagaacgagaaggctgcctgatcagagagtctctgaagaagattctgtggctacaggcttcagcagagtgtgagggagaccccggttatttcctcagctgtttccaccaaatcctcctgtctttcgtggccaacaccccaggcaaggcttggggcccccgtctgctgctggacgagccatgaagaagaagttagtggtgctgggcctgctggccgtggtcctggtgctggtcattgtcggcctctgtctctggctgccctcggcctccaaggaacctgacaaccatgtgtacaccagggctgccatggccgcggatgccaagcagtgcttggagattgggagggacacactgcgggacggtggctctgcagtggatgcagccattgcagccctgttgtgtgtggggctcatgaatgcccacagcatgggcatcggggttggcctcttcctcaccatctacaacagcaccacaggaaaagctgaggtcatcaatgcccgcgaggtggcccccaggctggcctttgccagcatgttcaacagctcggagcagtcccagaagggagggctgtcggtggcggtgcctggggagatccgaggctatgagctggcacaccagcggcatgggcggctgccctgggctcgcctcttccagcccagcatccagctggcccgccagggcttccctgtgggcaagggcttggcggcagtcctggaaaacaagcggactgtcatcgagcagcagcctgtcttgtggtatgtgttctgccgggatagaaaggtgcttcgggagggggagagactgaccctgccgcggctggctgacacctatgagatgctggccatcgagggtgcccaggccttctacaacggcagcctcatggcccagattgtgaaggacatccaggcggctgggggcattgtgacagctgaggacctgaacaactaccgtgctgagctgatcgagcacccgctgaacatcagcctgggagacgcggtgctgtacatgcccagtgcgcggctcagcgggcccgtgctggccctcatcctcaacatcctcaaagggtacaacttctcccgggagagcgtggagacccccgagcagaagggcctgacgtaccaccgcatcgtagaggctttccggtttgcctacgccaagaggaccctgcttggggaccccaagtttgtggatgtgactgaggtggtccgcaacatgacctctgagttcttcgctgcccagctccggtcccagatctctgaccacaccactcacccgatctcctactacaagcccgagttctacacgccggatgacgggggcactgctcacctgtctgtcgtcgcagaggacggcagtgctgtgtccgccaccagcaccatcaacctctactttggctccaaggtctgctccccggtcagtgggatcctgttcaataatgaatggacgacttcagctctcccagcattcaccaatgagtttggggcacccccctcacctgccaatttcatccagccagggaagcagccgctcttgtccatgtgcctgacgatcatggtgggccaggacggccaggtccggatggtggtgggagctgctgggggcacgcagatcaccacagacactgcactggccatcatctacaacctctggttcggctatgacgtgaagagggccgtggaggagccccggctgcacaacaagcttctgcccaacgtcacgacagtggagagaaacattgaccaggcagtgactgcagccctggagacccggcaccatcacacccagatcgcgtccaccttcatcgctgtggtgcaagccatcgtccgcacggctggtggctgggcagctgcctcggactccaggaaaggcggggaacctgctggctactgattgctccaggcagacaaggctgacaagcaatccagggacaagatactcaccaggatgaggaagaggactttgggggacgggcttcccctgtgagcagcagagcagcataataaatgaggccactgtgccaggctccaggtggcctccctggcctgtctcc

SEQ ID NO: 739 - DNA, 1398 bp, Homo sapiens
gctggacagttcagtgatttgcctgaggccccacagcagagttcaactggagacagagaaaccagctagaggcagagggaggtaacacggagtcccccagaaaggtctgggctgtgcgtgcttcaggtaacctcccttgaccttcaggagaacgagaaggctgcctgatcagagagtctctgaagaagattctgtggctacaggcttcagcagagtgtgagggagaccccggttatttcctcagctgtttccaccaaatcctcctgtctttcgtggccaacaccccaggcaaggcttggggcccccgtctgctgctggacgcagagccatgaagaagaagttagtggtgctgggcctgctggccgtggtcctggtgctggtcattgtcggcctctgtctctggctgccctcggcctccaaggaacctgacaaccatgagactgaagccagctctggggtctcagcaggtggtccgcaacatgacctctgagttcttcgctgcccagctccggtcccagatctctgaccacaccactcacccgatctcctactacaagcccgagttctacacgccggatgacgggggcactgctcacctgtctgtcgtcgcagaggacggcagtgctgtgtccgccaccagcaccatcaacctctactttggctccaaggtctgctccccggtcagtgggatcctgttcaataatgaatggacgacttcagctctcccagcattcaccaatgagtttggggcacccccctcacctgccaatttcatccagccagggaagcagccgctcttgtccatgtgcctgacgatcatggtgggccaggacggccaggtccggatggtggtgggagctgctgggggcacgcagatcaccacagacactgcactggtatgtgtcaccccttttctccctggccctgcccactctgcacagcccccaagccaccctgatcacactcccatgccccaggccatcatctacaacctctggttcggctatgacgtgaagagggccgtggaggagccccggctgcacaacaagcttctgcccaacgtcacgacagtggagagaaacattgaccaggcagtgactgcagccctggagacccggcaccatcacacccagatcgcgtccaccttcatcgctgtggtgcaagccatcgtccgcacggctggtggctgggcagctgcctcggactccaggaaaggcggggaacctgctggctactgattgctccaggcagacaaggctgacaagcaatccagggacaagatactcaccaggatgaggaagaggactttgggggacgggcttcccctgtgagcagcagagcagcataataaatgaggccactgtgccaggctccaggtggcctccctggcctgtctcc

SEQ ID NO: 740 - DNA, 1096 bp, Homo sapiens
tgcggcaagggtctggaggctgaggaccaggcagacagacattcagagttgctggaacgcgacagagacagggagtcagactggtcatgcaaggtcttgggcctgcccttgggtcctggggagccacggaaggttgtgggtgccagagggttgcggtcagagtcacagtcaagggccttctgagacctgtgccccctccccaccctccctccccacctcctcaggccagctctggggtctcagcaggtggtccgcaacatgacctctgagttcttcgctgcccagctccggtcccagatctctgaccacaccactcacccgatctcctactacaagcccgagttctacacgccggatgacgggggcactgctcacctgtctgtcgtcgcagaggacggcagtgctgtgtccgccaccagcaccatcaacctctactttggctccaaggtctgctccccggtcagtgggatcctgttcaataatgaatggacgacttcagctctcccagcattcaccaatgagtttggggcacccccctcacctgccaatttcatccagccagggaagcagccgctcttgtccatgtgcctgacgatcatggtgggccaggacggccaggtccggatggtggtgggagctgctgggggcacgcagatcaccacagacactgcactggccatcatctacaacctctggttcggctatgacgtgaagagggccgtggaggagccccggctgcacaacaagcttctgcccaacgtcacgacagtggagagaaacattgaccaggcagtgactgcagccctggagacccggcaccatcacacccagatcgcgtccaccttcatcgctgtggtgcaagccatcgtccgcacggctggtggctgggcagctgcctcggactccaggaaaggcggggaacctgctggctactgattgctccaggcagacaaggctgacaagcaatccagggacaagatactcaccaggatgaggaagaggactttgggggacgggcttcccctgtgagcagcagagcagcataataaatgaggccactgtgccaggctccaggtggcctccctggcctgtctcc

SEQ ID NO: 741 - DNA, 871 bp, Homo sapiens
gagtcagactggtcatgcaaggtggtccgcaacatgacctctgagttcttcgctgcccagctccggtcccagatctctgaccacaccactcacccgatctcctactacaagcccgagttctacacgccggatgacgggggcactgctcacctgtctgtcgtcgcagaggacggcagtgctgtgtccgccaccagcaccatcaacctctactttggctccaaggtctgctccccggtcagtgggatcctgttcaataatgaatggacgacttcagctctcccagcattcaccaatgagtttggggcacccccctcacctgccaatttcatccagccagggaagcagccgctcttgtccatgtgcctgacgatcatggtgggccaggacggccaggtccggatggtggtgggagctgctgggggcacgcagatcaccacagacactgcactggccatcatctacaacctctggttcggctatgacgtgaagagggccgtggaggagccccggctgcacaacaagcttctgcccaacgtcacgacagtggagagaaacattgaccaggcagtgactgcagccctggagacccggcaccatcacacccagatcgcgtccaccttcatcgctgtggtgcaagccatcgtccgcacggctggtggctgggcagctgcctcggactccaggaaaggcggggaacctgctggctactgattgctccaggcagacaaggctgacaagcaatccagggacaagatactcaccaggatgaggaagaggactttgggggacgggcttcccctgtgagcagcagagcagcataataaatgaggccactgtgccaggctccaggtggcctccctggcctgtctcc

SEQ ID NO: 742 - DNA, 1648 bp, Homo sapiens
atgcccacagcatgggcatcggggttggcctcttcctcaccatctacaacagcaccactcatgactgaggtcatcaatgcccgcgaggtggcccccaggctggcctttgccagcatgttcaacagctcggagcagtcccagaagggagggctgtcggtggcggtgcctggggagatccgaggctatgagctggcacaccagcggcatgggcggctgccctgggctcgcctcttccagcccagcatccagctggcccgccagggcttccctgtgggcaagggcttggcggcagtcctggaaaacaagcggactgtcatcgagcagcagcctgtcttgtgccccctctgccccggtgaggtgttctgccgggatagaaaggtgcttcgggagggggagagactgaccctgccgcggctggctgacacctatgagatgctggccatcgagggtgcccaggccttctacaacggcagcctcatggcccagattgtgaaggacatccaggcggctgggggcattgtgacagctgaggacctgaacaactaccgtgctgagctgatcgagcacccgctgaacatcagcctgggagacgcggtgctgtacatgcccagtgcgcggctcagcgggcccgtgctggccctcatcctcaacatcctcaaagggtacaacttctcccgggagagcgtggagacccccgagcagaagggcctgacgtaccaccgcatcgtagaggctttccggtttgcctacgccaagaggaccctgcttggggaccccaagtttgtggatgtgactgaggtggtccgcaacatgacctctgagttcttcgctgcccagctccggtcccagatctctgaccacaccactcacccgatctcctactacaagcccgagttctacacgccggatgacgggggcactgctcacctgtctgtcgtcgcagaggacggcagtgctgtgtccgccaccagcaccatcaacctctactttggctccaaggtctgctccccggtcagtgggatcctgttcaataatgaatggacgacttcagctctcccagcattcaccaatgagtttggggcacccccctcacctgccaatttcatccagccagggaagcagccgctcttgtccatgtgcctgacgatcatggtgggccaggacggccaggtccggatggtggtgggagctgctgggggcacgcagatcaccacagacactgcactggccatcatctacaacctctggttcggctatgacgtgaagagggccgtggaggagccccggctgcacaacaagcttctgcccaacgtcacgacagtggagagaaacattgaccaggcagtgactgcagccctggagacccggcaccatcacacccagatcgcgtccaccttcatcgctgtggtgcaagccatcgtccgcacggctggtggctgggcagctgcctcggactccaggaaaggcggggaacctgctggctactgattgctccaggcagacaaggctgacaagcaatccagggacaagatactcaccaggatgaggaagaggactttgggggacgggcttcccctgtgagcagcagagcagcataataaatgaggccactgtgccaggctccaggtggcctccctggcctgtctcc

SEQ ID NO: 743 - DNA, 965 bp, Homo sapiens
tgcggcaagggtctggaggctgaggaccaggcagacagacattcagagttgctggaacgcgacagagacagggagtcagactggtcatgcaaggccagctctggggtctcagcaggtggtccgcaacatgacctctgagttcttcgctgcccagctccggtcccagatctctgaccacaccactcacccgatctcctactacaagcccgagttctacacgccggatgacgggggcactgctcacctgtctgtcgtcgcagaggacggcagtgctgtgtccgccaccagcaccatcaacctctactttggctccaaggtctgctccccggtcagtgggatcctgttcaataatgaatggacgacttcagctctcccagcattcaccaatgagtttggggcacccccctcacctgccaatttcatccagccagggaagcagccgctcttgtccatgtgcctgacgatcatggtgggccaggacggccaggtccggatggtggtgggagctgctgggggcacgcagatcaccacagacactgcactggccatcatctacaacctctggttcggctatgacgtgaagagggccgtggaggagccccggctgcacaacaagcttctgcccaacgtcacgacagtggagagaaacattgaccaggcagtgactgcagccctggagacccggcaccatcacacccagatcgcgtccaccttcatcgctgtggtgcaagccatcgtccgcacggctggtggctgggcagctgcctcggactccaggaaaggcggggaacctgctggctactgattgctccaggcagacaaggctgacaagcaatccagggacaagatactcaccaggatgaggaagaggactttgggggacgggcttcccctgtgagcagcagagcagcataataaatgaggccactgtgccaggctccaggtggcctccctggcctgtctcc

SEQ ID NO: 744 - DNA, 885 bp, Homo sapiens
cctgacgtaccaccgcatcgtagaggctttctggtttgcctacgccaagaggaccctgcttggggaccccaagtttgtgaatgtgactgaggccagctctggggtctcggcaggtggtccgcaacatgacctctgagttcttcgctgcccagctctgggcccagatctctgacaacaccactcacacgatctcctactacaagcccaagttctacacgccggatgacaggggcactgctcacctgtctgtcatcacagaggacggcagtgctgtgtccgccaccagcaccatcaacctctactttggctccaaggtctgctccccggtcagcgggatcctgttcaataatgaatggacgacttcagctctcccagcatcaccaatgagtttggggtacccccctcacctgccaatttcatccagccagcccccaagccatgctgatcacactcccatgccccaggccatcatctacaacctctggttcggctatgacatgaagcgggccgtggaggagcaccggctgcacaaccagcttctgcccaacatcacgacagtggagagaaacattgaccaggcagtgactgcagccctggagacccggcaccatcacacccagatcgcgtccaccttcatcgctgtggtgcaagccatcgtccgcacggctggtggctgggcagctgcctcagactccaggaaaggtggggagcctgccggctactgagtgctccgggcagacaaggctgacaagcaatccagggacaagatactcacgaggacgaggaagaggactttgggggacgggcttcccctgtgagcagcagagcagcataataaatgaggccactgtgccaggctccaggtggcctccctggcctgtctcc

SEQ ID NO: 745 - DNA, 1206 bp, Homo sapiens
tgccgggatagaaaggtgcttcgggagggggagagactgaccctgccgcgggtggctgacacctatgagacgctggccattgagggtgcccaggccttctacaatggcagcctcatggcccagattgtgaaggacatccaggcggccggggcattgtgacagctgaggacctgaacaactactgtgctgagctgatcgagcacccgctgaacatcagcctgggagacgcggtgctgtacatgcccagtgcgccgctcagcgggcccgtgctggccctcatcctcaacatcctcaaagggtacaacttctcctgggagagtgtggagacccccgagcagaagggcctgacgtaccaccgcatcgtagaggctttctggtttgcctacgccaagaggaccctgcttggggaccccaagtttgtgaatgtgactgaggtggtccgcaacatgacctctgagttcttcgctgcccagctctgggcccagatctctgacaacaccactcacacgatctcctactacaagcccaagttctacacgccggatgacaggggcactgctcacctgtctgtcatcacagaggacggcagtgctgtgtccgccaccagcaccatcaacctctactttggctccaaggtctgctccccggtcagcgggatcctgttcaataatgaatggacgacttcagctctcccagcatcaccaatgagtttggggtacccccctcacctgccaatttcatccagccagcccccaagccatgctgatcacactcccatgccccaggccatcatctacaacctctggttcggctatgacatgaagcgggccgtggaggagcaccggctgcacaaccagcttctgcccaacatcacgacagtggagagaaacattgaccaggcagtgactgcagccctggagacccggcaccatcacacccagatcgcgtccaccttcatcgctgtggtgcaagccatcgtccgcacggctggtggctgggcagctgcctcagactccaggaaaggtggggagcctgccggctactgagtgctccgggcagacaaggctgacaagcaatccagggacaagatactcacgaggacgaggaagaggactttgggggacgggcttcccctgtgagcagcagagcagcataataaatgaggccactgtgccaggctccaggtggcctccctggcctgtctcc

SEQ ID NO: 746 - DNA, 387 bp, Homo sapiens
atggtgctcccaccgcaggccagcaggaagaccaagaagaaggaagggggtgccctccgggcccagagagcctcatccaatgtcttctccaactttgagcagactcagatccaggagttcaaggaggcattcacactcatggatcagaaccgagatggcttcattgacaaggaggacctgaaggacacctatgcctccctgggcaagaccaacgtcaaggacgacgagctggacgccatgctcaaagaggcctcggggcccatcaacttcaccatgtttctgaacctgtttggggagaagctgagcggtaccgacgccgaggagaccattcttaacgccttcaagatgctggacccggacgggaaagggaaaatcaacaaggagtag

SEQ ID NO: 747 - DNA, 1698 bp, Homo sapiens
catgaagcaataaacataggaggacctcactctgttgtgcatgctggagtacagtggcgcagtctctgctccctgaaacctcgacttccagggctcaagagatccttccatcttaccaagtagctgggactacagatgtatagttattttccaaacccaccattgtaaaattacattctattaaagagaaaaagaagaaaaagaaacttaatttgttttttgggggatagttgagatgtgtttaacacagcccctgctggtaaccaaggtcctcctccaatgacgggtatgaatatgaacaacagagcaactatacctggcccaccagtgggtcctggtcctgccatgggaccagaaggagccgcaaatatgggaactccaatgatgccagataatggagcagtggaagaaccggaactatgatttgtgccttccttattgcctccgaaatatttttaactgcagaggaaagcctgtattattttggagaaaggcgaacagataaaacgcacagcagtaaatttcagggactagaaactccttctcagtagagacaaggtttcaccctgttggcgaggctggtctcaaactcctgacgcccagtgatctgcccacctcggcctcccaaagtgctgggattacaggcgggagccaccatgatggccaacttttgaattctgaaccagttgattgagtaccagagctcttcaataccttgaagaaagattcaggggagagccgttgtgaacagcttgccccagggaaaggacaaggctgagagaattccagggcttccttgagaaaacagaattgaggaaatgcaaagtgaagaattctagcatcaggaacaagagaagaatgatggaaaacctgctactgagatatgttggatattttgcacaagtgaaacatctctacaactggaatctccctccaagacggatactctttataataagattcattatttattcgattcgtggtgttggaacaggcgatgtatgtgatctaaaattccaaatagtaatggagaaaaaggttgtcttttccagtacttcattaggaaattgttcaatactgcatgacattgaaacagctggtgtattaactaatgtatatgacagtccatctctgtacgatgatgtgaaagtgcagtttttctcttcgaatcttcctaaatactatgacaattgttcatttttcttctggttcaacacatcttttattcaaaataacagagagaaatttagatattttattaaacttggaagtcattaatgccatataaagcaatgctaagagagtcagcatgtgttactgatgtgttgctgaagattaaagtatttttaagtctcaccaaaaaggtggaaggagccaactgagacacaaaaaaggggctgaggttctattcacggctttatctaccaagaaatgaattggataatccacatcaacaaaaagcatggaaaatttatccaccagaatttgccgtggagatactttttggcgagaaatgacttccaatgacgtagctggatccgattaagtatagtttccccttccccttctgggaaagaattaatgttctttccaacccctgccatgtgcatgttcatatgtcctaagtcttccttgatgatgtatctatatttatatatgtttatatatgttcttcataaatctattaaatatatatag

SEQ ID NO: 748 - DNA, 810 bp, Homo sapiens
tctgagttcttcgctgcccagctctgggcccagatctctgacaacaccactcacacgatctcctactacaagcccaagttctacacgccggatgacaggggcactgctcacctgtctgtcatcacagaggacggcagtgctgtgtccgccaccagcaccatcaacctctactttggctccaaggtctgctccccggtcagcgggatcctgttcaataatgaatggacgacttcagctctcccagcatcaccaatgagtttggggtacccccctcacctgccaatttcatccagccagggaagcagccgctctcgtccatgttcccaacgatcatggtgggccaggacggccagcccccaagccatgctgatcacactcccatgccccaggccatcatctacaacctctggttcggctatgacatgaagcgggccgtggaggagcaccggctgcacaaccagcttctgcccaacatcacgacagtggagagaaacattgaccaggcagtgactgcagccctggagacccggcaccatcacacccagatcgcgtccaccttcatcgctgtggtgcaagccatcgtccgcacggctggtggctgggcagctgcctcagactccaggaaaggtggggagcctgccggctactgagtgctccgggcagacaaggctgacaagcaatccagggacaagatactcacgaggacgaggaagaggactttgggggacgggcttcccctgtgagcagcagagcagcataataaatgaggccactgtgccaggctccaggtggcctccctggcctgtctcc

SEQ ID NO: 749 - DNA, 1096 bp, Homo sapiens
tgcggcaagggtctggaggctgaggaccaggcagacagacattcagagttgctggaacgcgacagagacagggagtcagactggtcatgcaaggtcttgggcctgcccttgggtcctggggagccacggaaggttgtgggtgccagagggttgcggtcagagtcacagtcaagggccttctgagacctgtgccccctccccaccctccctccccacctcctcaggccagctctggggtctcagcaggtggtccgcaacatgacctctgagttcttcgctgcccagctccggtcccagatctctgaccacaccactcacccgatctcctactacaagcccgagttctacacgccggatgacgggggcactgctcacctgtctgtcgtcgcagaggacggcagtgctgtgtccgccaccagcaccatcaacctctactttggctccaaggtctgctccccggtcagtgggatcctgttcaataatgaatggacgacttcagctctcccagcattcaccaatgagtttggggcacccccctcacctgccaatttcatccagccagggaagcagccgctcttgtccatgtgcccgacgatcatggtgggccaggacggccaggtccggatggtggtgggagctgctgggggcacgcagatcaccacagacactgcactggccatcatctacaacctctggttcggctatgacgtgaagagggccgtggaggagccccggctgcacaacaagcttctgcccaacgtcacgacagtggagagaaacattgaccaggcagtgactgcagccctggagacccggcaccatcacacccagatcgcatccaccttcatcgctgtggtgcaagccatcgtccgcacggctggtggctgggcagctgcctcggactccaggaaaggcggggaacctgctggctactgattgctccaggcagacaaggctgacaagcaatccagggacaagatactcaccaggatgaggaagaggactttgggggacgggcttcccctgtgagcagcagagcagcataataaatgaggccactgtgccaggctccaggtggcctccctggcctgtctcc

SEQ ID NO: 750 - DNA, 1698 bp, Homo sapiens
catgaagcaataaacataggaggacctcactctgttgtgcatgctggagtacagtggcgcagtctctgctccctgaaacctcgacttccagggctcaagagatccttccatcttaccaagtagctgggactacagatgtatagttattttccaaacccaccattgtaaaattacattctattaaagagaaaaagaagaaaaagaaacttaatttgttttttgggggatagttgagatgcgtttagcccagcccctgctggtaaccaaggtcctcctccaatgacgggtatgaatatgaacaacagagcaactatacctggcccaccagtgggtcctggtcctgccatgggaccagaaggagccgcaaatatgggaactccaatgatgccagataatggagcagtggaagaaccggaactatgatttgtgccttccttattgcctccgaaatatttttaactgcagaggaaagcctgtattattttggagaaaggcgaacagataaaacgcacagcagtaaatttcagggactagaaactccttctcagtagagacaaggtttcaccctgttggcgaggctggtctcaaactcctgacgcccagtgatctgcccacctcggcctcccaaagtgctgggattacaggcgggagccaccatgatggccaacttttgaattctgaaccagttgattgagtaccagagctcttcaataccttgaagaaagattcaggggagagccgttgtgaacagcttgccccagggaaaggacaaggctgagagaattccagggcttccttgagaaaacagaattgaggaaatgcaaagtgaagaattctagcatcaggaacaagagaagaatgatggaaaacctgctactgagatatgttggatattttgcacaagtgaaacatctctacaactggaatctccctccaagacggatactctttataataagattcattatttattcgattcgtggtgttggaacaggcgatgtatgtgatctaaaattccaaatagtaatggagaaaaaggttgtcttttccagtacttcattaggaaattgttcaatactgcatgacattgaaacagctggtgtattaactaatgtatatgacagtccatctctgtacgatgatgtgaaagtgcagtttttctcttcaaatcttcctaaatactatgacaattgttcatttttcttctggttcaacacatcttttattcaaaataacagagagaaatttagatattttattaaacttggaagtcattaatgccatataaagcaatgctaagagagtcagcatgtgttactgatgtgttgctgaagattaaagtatttttaagtctcaccaaaaaggtggaaggagccaactgagacacaaaaaaggggctgaggttctattcacggctttatctaccaagaaatgaattggataatccacatcaacaaaaagcatggaaaatttatccaccagaatttgccgtggagatactttttggcgagaaatgacttccaatgacgtagctggatccgattaagtatagtttccccttccccttctgggaaagaattaatgttctttccaacccctgccatgtgcatgttcatatgtcctaagtcttccttgatgatgtatctatatttatatatgtttatatatgttcttcataaatctattaaatatatatag

SEQ ID NO: 751 - DNA, 2448 bp, Homo sapiens
ctgggtcacagcagggaatcttagcttggttttggtgtgctgctggacgaccagaccgggcgtcgggtgagcccagaagtgagagcagttggctgcgccccagtgctgtgtgacccagaggcgccacacaccctctctgagctggtggacatcatagcaggtgcagcccagaactgtcttctgaggaagaggtgctctcctgggcccccactgtccccaggcctcagcaaggcaagtgaggtgctgccatcttccaggctggacagttcagtgatttgcctgaggccccacagcagagttcaactggagacagagaaaccagctagaggcagagggaggtaacccggagtcccccagaaaggtctgggctgtgcgtgcttcaggtaacctcccttgaccttcaggagaacgagaaggctgcctgatcagagagtctctgaagaagattctgtggctacaggcttcagcagagtgtgagggagaccccagttatttcctcagctgtttccaccaaatcctcctgtctttcgtggccaacaccccaggcaaggcttggggcccccgtctgctgctggacgcagagccatgaagaagaagttagtggtgctgggcctgctggccgtggtcctggtgctggtcattgtcaatctctgtctctggctgccctcagcctccaaggaacctgacaaccatgtgtacaccagggctgccgtggctgcagatgccaagcagtgctcggagattgggagggacacactgcgggatggtggctctgcggtggatgcagccattgcagccctgttgtgtgtggggctcatgaatgcccacagcatgagcatcgggggtggcctcttcctcaccatctacaacagcacctctcatgactgaggtcatcaatgcccgcgaggtggcccccaggctggcctttgccagcatgttcaacagcttggagcagtcccagaagggagggctgtcagtggcagtgcctggggagatccgaggctatgagctggcacaccagcggcatgggcggctgccctgggctcgcctcttccagcccagcatccagctggcccgccagggcttccccgtgggcaagggcttggcggcagtcctggaaaacaagcggaccgtcatcgagcagcagcctgtcttgtgtgaggtgttctgccgggatagaaaggtgcttcgggagggggagagactgaccctgccgcgggtggctgacacctatgagacgctggccattgagggtgcccaggccttctacaatggcagcctcatggcccagattgtgaaggacatccaggcggccggggcattgtgacagctgaggacctgaacaactactgtgctgagctgatcgagcacccgctgaacatcagcctgggagacgcggtgctgtacatgcccagtgcgccgctcagcgggcccgtgctggccctcatcctcaacatcctcaaagggtacaacttctcctgggagagtgtggagacccccgagcagaagggcctgacgtaccaccgcatcgtagaggctttctggtttgcctacgccaagaggaccctgcttggggaccccaagtttgtgaatgtgactgaggtggtccgcaacatgacctctgagttcttcgctgcccagctctgggcccagatctctgacaacaccactcacacgatctcctactacaagcccaagttctacacgccggatgacaggggcactgctcacctgtctgtcatcacagaggacggcagtgctgtgtccgccaccagcaccatcaacctctactttggctccaaggtctgctccccggtcagcgggatcctgttcaataatgaatggacgacttcagctctcccagcatcaccaatgagtttggggtacccccctcacctgccaatttcatccagccagggaagcagccgctctcgtccatgttcccaacgatcatggtgggccaggacggccaggtccggatggtggtgggagctgctgggggcacgcagatcaccacagccactgcactggccatcatctacaacctctggttcggctatgacatgaagcgggccgtggaggagcaccggctgcacaaccagcttctgcccaacatcacgacagtggagagaaacattgaccaggcagtgactgcagccctggagacccggcaccatcacacccagatcgcgtccaccttcatcgctgtggtgcaagccatcgtccgcacggctggtggctgggcagctgcctcagactccaggaaaggtggggagcctgccggctactgagtgctccgggcagacaaggctgacaagcaatccagggacaagatactcacgaggacgaggaagaggactttgggggacgggcttcccctgtgagcagcagagcagcataataaatgaggccactgtgccaggctccaggtggcctccctggcctgtc

SEQ ID NO: 752 - DNA, 2342 bp, Homo sapiens
ctgggtcacagcagggaatcttagcttggttttggtgtgctgctggacgaccagaccgggcgtcgggtgagcccagaagtgagagcagttggctgcgccccagtgctgtgtgacccagaggcgccacacaccctctctgagctggtggacatcatagcaggtgcagcccagaactgtcttctgaggaagaggtgctctcctgggcccccactgtccccaggcctcagcaaggcaagtgaggtgctgccatcttccaggctggacagttcagtgatttgcctgaggccccacagcaggagaacgagaaggctgcctgatcagagagtctctgaagaagattctgtggctacaggcttcagcagagtgtgagggagaccccagttatttcctcagctgtttccaccaaatcctcctgtctttcgtggccaacaccccaggcaaggcttggggcccccgtctgctgctggacgagccatgaagaagaagttagtggtgctgggcctgctggccgtggtcctggtgctggtcattgtcaatctctgtctctggctgccctcagcctccaaggaacctgacaaccatgtgtacaccagggctgccgtggctgcagatgccaagcagtgctcggagattgggagggacacactgcgggatggtggctctgcggtggatgcagccattgcagccctgttgtgtgtggggctcatgaatgcccacagcatgagcatcgggggtggcctcttcctcaccatctacaacagcacctcaggaaaagctgaggtcatcaatgcccgcgaggtggcccccaggctggcctttgccagcatgttcaacagcttggagcagtcccagaagggagggctgtcagtggcagtgcctggggagatccgaggctatgagctggcacaccagcggcatgggcggctgccctgggctcgcctcttccagcccagcatccagctggcccgccagggcttccccgtgggcaagggcttggcggcagtcctggaaaacaagcggaccgtcatcgagcagcagcctgtcttgtgtgaggtgttctgccgggatagaaaggtgcttcgggagggggagagactgaccctgccgcgggtggctgacacctatgagacgctggccattgagggtgcccaggccttctacaatggcagcctcatggcccagattgtgaaggacatccaggcggccggggcattgtgacagctgaggacctgaacaactactgtgctgagctgatcgagcacccgctgaacatcagcctgggagacgcggtgctgtacatgcccagtgcgccgctcagcgggcccgtgctggccctcatcctcaacatcctcaaagggtacaacttctcctgggagagtgtggagacccccgagcagaagggcctgacgtaccaccgcatcgtagaggctttctggtttgcctacgccaagaggaccctgcttggggaccccaagtttgtgaatgtgactgaggtggtccgcaacatgacctctgagttcttcgctgcccagctctgggcccagatctctgacaacaccactcacacgatctcctactacaagcccaagttctacacgccggatgacaggggcactgctcacctgtctgtcatcacagaggacggcagtgctgtgtccgccaccagcaccatcaacctctactttggctccaaggtctgctccccggtcagcgggatcctgttcaataatgaatggacgacttcagctctcccagcatcaccaatgagtttggggtacccccctcacctgccaatttcatccagccagggaagcagccgctctcgtccatgttcccaacgatcatggtgggccaggacggccaggtccggatggtggtgggagctgctgggggcacgcagatcaccacagccactgcactggccatcatctacaacctctggttcggctatgacatgaagcgggccgtggaggagcaccggctgcacaaccagcttctgcccaacatcacgacagtggagagaaacattgaccaggcagtgactgcagccctggagacccggcaccatcacacccagatcgcgtccaccttcatcgctgtggtgcaagccatcgtccgcacggctggtggctgggcagctgcctcagactccaggaaaggtggggagcctgccggctactgagtgctccgggcagacaaggctgacaagcaatccagggacaagatactcacgaggacgaggaagaggactttgggggacgggcttcccctgtgagcagcagagcagcataataaatgaggccactgtgccaggctccaggtggcctccctggcctgtctcc

SEQ ID NO: 753 - DNA, 949 bp, Homo sapiens
gctctggggtctcagcaggtggtccgcaacatgacctctgagttcttcgctgcccagctccggtcccagatctctgaccacaccactcacccgatctcctactacaagcccgagttctacacgccggatgacgggggcactgctcacctgtctgtcgtcgcagaggacggcagtgctgtgtccgccaccagcaccatcaacctctactttggctccaaggtctgctccccggtcagtgggatcctgttcaataatgaatggacgacttcagctctcccagcattcaccaatgagtttggggcacccccctcacctgccaatttcatccagccagggaagcagccgctcttgtccatgtgcccgacgatcatggtgggccaggacggccaggtccggatggtggtgggagctgctgggggcacgcagatcaccacagacactgcactggtatgtgtcaccccttttctccctggccctgcccactctgcacagcccccaagccacgctgatcacactcccatgccccaggccatcatctacaacctctggttcggctatgacgtgaagagggccgtggaggagccccggctgcacaacaagcttctgcccaacgtcacgacagtggagagaaacattgaccaggcagtgactgcagccctggagacccggcaccatcacacccagatcgcatccaccttcatcgctgtggtgcaagccatcgtccgcacggctggtggctgggcagctgcctcggactccaggaaaggcggggaacctgctggctactgattgctccaggcagacaaggctgacaagcaatccagggacaagatactcaccaggatgaggaagaggactttgggggacgggcttcccctgtgagcagcagagcagcataataaatgaggccactgtgccaggctccaggtggcctccctggcctgtctcc

SEQ ID NO: 754 - DNA, 2453 bp, Homo sapiens
ctgggtcacagcagggaatcttagcttggttttggtgtgctgctggacgaccagaccgggcgtcgggtgagcccagaagtgagagcagttggctgcgccccagtgctgtgtgacccagaggcgccacacaccctctctgagctggtggacatcatagcaggtgcagcccagaactgtcttctgaggaagaggtgctctcctgggcccccactgtccccaggcctcagcaaggcaagtgaggtgctgccatcttccaggctggacagttcagtgatttgcctgaggccccacagcagagttcaactggagacagagaaaccagctagaggcagagggaggtaacccggagtcccccagaaaggtctgggctgtgcgtgcttcaggtaacctcccttgaccttcaggagaacgagaaggctgcctgatcagagagtctctgaagaagattctgtggctacaggcttcagcagagtgtgagggagaccccagttatttcctcagctgtttccaccaaatcctcctgtctttcgtggccaacaccccaggcaaggcttggggcccccgtctgctgctggacgcagagccatgaagaagaagttagtggtgctgggcctgctggccgtggtcctggtgctggtcattgtcaatctctgtctctggctgccctcagcctccaaggaacctgacaaccatgtgtacaccagggctgccgtggctgcagatgccaagcagtgctcggagattgggagggacacactgcgggatggtggctctgcggtggatgcagccattgcagccctgttgtgtgtggggctcatgaatgcccacagcatgagcatcgggggtggcctcttcctcaccatctacaacagcacctcaggaaaagctgaggtcatcaatgcccgcgaggtggcccccaggctggcctttgccagcatgttcaacagcttggagcagtcccagaagggagggctgtcagtggcagtgcctggggagatccgaggctatgagctggcacaccagcggcatgggcggctgccctgggctcgcctcttccagcccagcatccagctggcccgccagggcttccccgtgggcaagggcttggcggcagtcctggaaaacaagcggaccgtcatcgagcagcagcctgtcttgtgtgaggtgttctgccgggatagaaaggtgcttcgggagggggagagactgaccctgccgcgggtggctgacacctatgagacgctggccattgagggtgcccaggccttctacaatggcagcctcatggcccagattgtgaaggacatccaggcggccggggcattgtgacagctgaggacctgaacaactactgtgctgagctgatcgagcacccgctgaacatcagcctgggagacgcggtgctgtacatgcccagtgcgccgctcagcgggcccgtgctggccctcatcctcaacatcctcaaagggtacaacttctcctgggagagtgtggagacccccgagcagaagggcctgacgtaccaccgcatcgtagaggctttctggtttgcctacgccaagaggaccctgcttggggaccccaagtttgtgaatgtgactgaggtggtccgcaacatgacctctgagttcttcgctgcccagctctgggcccagatctctgacaacaccactcacacgatctcctactacaagcccaagttctacacgccggatgacaggggcactgctcacctgtctgtcatcacagaggacggcagtgctgtgtccgccaccagcaccatcaacctctactttggctccaaggtctgctccccggtcagcgggatcctgttcaataatgaatggacgacttcagctctcccagcatcaccaatgagtttggggtacccccctcacctgccaatttcatccagccagggaagcagccgctctcgtccatgttcccaacgatcatggtgggccaggacggccaggtccggatggtggtgggagctgctgggggcacgcagatcaccacagccactgcactggccatcatctacaacctctggttcggctatgacatgaagcgggccgtggaggagcaccggctgcacaaccagcttctgcccaacatcacgacagtggagagaaacattgaccaggcagtgactgcagccctggagacccggcaccatcacacccagatcgcgtccaccttcatcgctgtggtgcaagccatcgtccgcacggctggtggctgggcagctgcctcagactccaggaaaggtggggagcctgccggctactgagtgctccgggcagacaaggctgacaagcaatccagggacaagatactcacgaggacgaggaagaggactttgggggacgggcttcccctgtgagcagcagagcagcataataaatgaggccactgtgccaggctccaggtggcctccctggcctgtctcc

SEQ ID NO: 755 - DNA, 2624 bp, Homo sapiens
ccaagcctggggaggtggccacccttccacgatggcatttggatgttccctgtgtgtggggagggcacagggactccattcgtagaccacctctgggacagtgtgtctgcctctgaggtcagacgctctgcactgggacagggtggagtggagggaaacccagcttggggctcattggaggggcttgctggcagacaccgccctttgtgggaaactgactgtgggagaggggaaccccaacctctgtcaccacatccctcttccctgttgtcacacctgtcacttgctgccatagccatgagacttcccaagggtcactgctgccactcactgcacagcctggaagggagtccacaggggacatagagtgagcaagagacctgtgccactcaggcctcctgggggtgtccccagtgcagccatgatgataatcacagctaccattcaccaagtcctgcccacagtctaacctactctattcacaacactcccagcagcaaggcaagtgaggtgctgccatcttccaggctggacagttcagtgatttgcctgaggccccacagcagagttcaactggagacagagaaaccagctagaggcagagggaggtaacccggagtcccccagaaaggtctgggctgtgcgtgcttcagctgtttccaccaaatcctcctgtctttcgtggccaacaccccaggcaaggcttggggcccccgtctgctgctggacgcagagccatgaagaagaagttagtggtgctgggcctgctggccgtggtcctggtgctggtcattgtcaatctctgtctctggctgccctcagcctccaaggaacctgacaaccatgtgtacaccagggctgccgtggctgcagatgccaagcagtgctcggagattgggagggacacactgcgggatggtggctctgcggtggatgcagccattgcagccctgttgtgtgtggggctcatgaatgcccacagcatgagcatcgggggtggcctcttcctcaccatctacaacagcacctcaggaaaagctgaggtcatcaatgcccgcgaggtggcccccaggctggcctttgccagcatgttcaacagcttggagcagtcccagaagggagggctgtcagtggcagtgcctggggagatccgaggctatgagctggcacaccagcggcatgggcggctgccctgggctcgcctcttccagcccagcatccagctggcccgccagggcttccccgtgggcaagggcttggcggcagtcctggaaaacaagcggaccgtcatcgagcagcagcctgtcttgtgtgaggtgttctgccgggatagaaaggtgcttcgggagggggagagactgaccctgccgcgggtggctgacacctatgagacgctggccattgagggtgcccaggccttctacaatggcagcctcatggcccagattgtgaaggacatccaggcggccggggcattgtgacagctgaggacctgaacaactactgtgctgagctgatcgagcacccgctgaacatcagcctgggagacgcggtgctgtacatgcccagtgcgccgctcagcgggcccgtgctggccctcatcctcaacatcctcaaagggtacaacttctcctgggagagtgtggagacccccgagcagaagggcctgacgtaccaccgcatcgtagaggctttctggtttgcctacgccaagaggaccctgcttggggaccccaagtttgtgaatgtgactgaggccagctctggggtctcggcaggtggtccgcaacatgacctctgagttcttcgctgcccagctctgggcccagatctctgacaacaccactcacacgatctcctactacaagcccaagttctacacgccggatgacaggggcactgctcacctgtctgtcatcacagaggacggcagtgctgtgtccgccaccagcaccatcaacctctactttggctccaaggtctgctccccggtcagcgggatcctgttcaataatgaatggacgacttcagctctcccagcatcaccaatgagtttggggtacccccctcacctgccaatttcatccagccagggaagcagccgctctcgtccatgttcccaacgatcatggtgggccaggacggccaggtccggatggtggtgggagctgctgggggcacgcagatcaccacagccactgcactggccatcatctacaacctctggttcggctatgacatgaagcgggccgtggaggagcaccggctgcacaaccagcttctgcccaacatcacgacagtggagagaaacattgaccaggcagtgactgcagccctggagacccggcaccatcacacccagatcgcgtccaccttcatcgctgtggtgcaagccatcgtccgcacggctggtggctgggcagctgcctcagactccaggaaaggtggggagcctgccggctactgagtgctccgggcagacaaggctgacaagcaatccagggacaagatactcacgaggacgaggaagaggactttgggggacgggcttcccctgtgagcagcagagcagcataataaatgaggccactgtgccaggctccaggtggcctccctggcctgtc

SEQ ID NO: 756 - DNA, 2615 bp, Homo sapiens
ctggacgaccagaccgggcgtcgggtgagcccagaagtgagagcagttggctgcgccccagtgctgtgtgacccagaggcgccacacaccctctctgagctggtggacatcataggtggggaagctcaggtcagggcactcccatgagtgtctggaggcctgagttccattctcagctctgccatatgcttgctgcgctctagaggagttcctcttcctctccgagcctcggtttatgtacccgtgcagtgggagtgagttgcacttcggggtgaagggggcaagacttgtgtgggcgcatcctgcagagggatcccacagcaggtgcagcccagaactgtcttctgaggaagaggtgctctcctgggcccccactgtccccaggcctcagcaaggcaagtgaggtgctgccatcttccaggctggacagttcagtgatttgcctgaggccccacagcagagttcaactggagacagagaaaccagctagaggcagagggaggtaacccggagtcccccagaaaggtctgggctgtgcgtgcttcaggtaacctcccttgaccttcaggagaacgagaaggctgcctgatcagagagtctctgaagaagattctgtggctacaggcttcagcagagtgtgagggagaccccagttatttcctcagctgtttccaccaaatcctcctgtctttcgtggccaacaccccaggcaaggcttggggcccccgtctgctgctggacgcagagccatgaagaagaagttagtggtgctgggcctgctggccgtggtcctggtgctggtcattgtcaatctctgtctctggctgccctcagcctccaaggaacctgacaaccatgtgtacaccagggctgccgtggctgcagatgccaagcagtgctcggagattgggagggacacactgcgggatggtggctctgcggtggatgcagccattgcagccctgttgtgtgtggggctcatgaatgcccacagcatgagcatcgggggtggcctcttcctcaccatctacaacagcacctcaggaaaagctgaggtcatcaatgcccgcgaggtggcccccaggctggcctttgccagcatgttcaacagcttggagcagtcccagaagggagggctgtcagtggcagtgcctggggagatccgaggctatgagctggcacaccagcggcatgggcggctgccctgggctcgcctcttccagcccagcatccagctggcccgccagggcttccccgtgggcaagggcttggcggcagtcctggaaaacaagcggaccgtcatcgagcagcagcctgtcttgtgtgaggtgttctgccgggatagaaaggtgcttcgggagggggagagactgaccctgccgcgggtggctgacacctatgagacgctggccattgagggtgcccaggccttctacaatggcagcctcatggcccagattgtgaaggacatccaggcggccggggcattgtgacagctgaggacctgaacaactactgtgctgagctgatcgagcacccgctgaacatcagcctgggagacgcggtgctgtacatgcccagtgcgccgctcagcgggcccgtgctggccctcatcctcaacatcctcaaagggtacaacttctcctgggagagtgtggagacccccgagcagaagggcctgacgtaccaccgcatcgtagaggctttctggtttgcctacgccaagaggaccctgcttggggaccccaagtttgtgaatgtgactgaggtggtccgcaacatgacctctgagttcttcgctgcccagctctgggcccagatctctgacaacaccactcacacgatctcctactacaagcccaagttctacacgccggatgacaggggcactgctcacctgtctgtcatcacagaggacggcagtgctgtgtccgccaccagcaccatcaacctctactttggctccaaggtctgctccccggtcagcgggatcctgttcaataatgaatggacgacttcagctctcccagcatcaccaatgagtttggggtacccccctcacctgccaatttcatccagccagggaagcagccgctctcgtccatgttcccaacgatcatggtgggccaggacggccaggtccggatggtggtgggagctgctgggggcacgcagatcaccacagccactgcactggccatcatctacaacctctggttcggctatgacatgaagcgggccgtggaggagcaccggctgcacaaccagcttctgcccaacatcacgacagtggagagaaacattgaccaggcagtgactgcagccctggagacccggcaccatcacacccagatcgcgtccaccttcatcgctgtggtgcaagccatcgtccgcacggctggtggctgggcagctgcctcagactccaggaaaggtggggagcctgccggctactgagtgctccgggcagacaaggctgacaagcaatccagggacaagatactcacgaggacgaggaagaggactttgggggacgggcttcccctgtgagcagcagagcagcataataaatgaggccactgtgccaggctccaggtggcctccctggcctgtct

SEQ ID NO: 757 - DNA, 2584 bp, Homo sapiens
ctgggtcacagcagggaatcttagcttggttttggtgtgctgctggacgaccagaccgggcgtcgggtgagcccagaagtgagagcagttggctgcgccccagtgctgtgtgacccagaggcgccacacaccctctctgagctggtggacatcatagcaggtgcagcccagaactgtcttctgaggaagaggtgctctcctgggcccccactgtccccaggcctcagatgctgcatattgctggcccagctcctgaggctctttggacctccaggaatcggtgtctctatcaggaacccttaaccctgacccggactcccggctgggacccagggtgttggagtggcaggagcgctgtcaggcttggtgaagggtgtgagctgtccaacggggcaaggaggaggcagggcctgttctgtagttggacagacagagccctctagctgctttctggaagactgaagggcagcaaggcaagtgaggtgctgccatcttccaggctggacagttcagtgatttgcctgaggccccacagcaggagaacgagaaggctgcctgatcagagagtctctgaagaagattctgtggctacaggcttcagcagagtgtgagggagaccccagttatttcctcagctgtttccaccaaatcctcctgtctttcgtggccaacaccccaggcaaggcttggggcccccgtctgctgctggacgcagagccatgaagaagaagttagtggtgctgggcctgctggccgtggtcctggtgctggtcattgtcaatctctgtctctggctgccctcagcctccaaggaacctgacaaccatgtgtacaccagggctgccgtggctgcagatgccaagcagtgctcggagattgggagggacacactgcgggatggtggctctgcggtggatgcagccattgcagccctgttgtgtgtggggctcatgaatgcccacagcatgagcatcgggggtggcctcttcctcaccatctacaacagcacctcaggaaaagctgaggtcatcaatgcccgcgaggtggcccccaggctggcctttgccagcatgttcaacagcttggagcagtcccagaagggagggctgtcagtggcagtgcctggggagatccgaggctatgagctggcacaccagcggcatgggcggctgccctgggctcgcctcttccagcccagcatccagctggcccgccagggcttccccgtgggcaagggcttggcggcagtcctggaaaacaagcggaccgtcatcgagcagcagcctgtcttgtgtgaggtgttctgccgggatagaaaggtgcttcgggagggggagagactgaccctgccgcgggtggctgacacctatgagacgctggccattgagggtgcccaggccttctacaatggcagcctcatggcccagattgtgaaggacatccaggcggccggggcattgtgacagctgaggacctgaacaactactgtgctgagctgatcgagcacccgctgaacatcagcctgggagacgcggtgctgtacatgcccagtgcgccgctcagcgggcccgtgctggccctcatcctcaacatcctcaaagggtacaacttctcctgggagagtgtggagacccccgagcagaagggcctgacgtaccaccgcatcgtagaggctttctggtttgcctacgccaagaggaccctgcttggggaccccaagtttgtgaatgtgactgaggtggtccgcaacatgacctctgagttcttcgctgcccagctctgggcccagatctctgacaacaccactcacacgatctcctactacaagcccaagttctacacgccggatgacaggggcactgctcacctgtctgtcatcacagaggacggcagtgctgtgtccgccaccagcaccatcaacctctactttggctccaaggtctgctccccggtcagcgggatcctgttcaataatgaatggacgacttcagctctcccagcatcaccaatgagtttggggtacccccctcacctgccaatttcatccagccagggaagcagccgctctcgtccatgttcccaacgatcatggtgggccaggacggccaggtccggatggtggtgggagctgctgggggcacgcagatcaccacagccactgcactggccatcatctacaacctctggttcggctatgacatgaagcgggccgtggaggagcaccggctgcacaaccagcttctgcccaacatcacgacagtggagagaaacattgaccaggcagtgactgcagccctggagacccggcaccatcacacccagatcgcgtccaccttcatcgctgtggtgcaagccatcgtccgcacggctggtggctgggcagctgcctcagactccaggaaaggtggggagcctgccggctactgagtgctccgggcagacaaggctgacaagcaatccagggacaagatactcacgaggacgaggaagaggactttgggggacgggcttcccctgtgagcagcagagcagcataataaatgaggccactgtgccaggctccaggtggcctccctggcctgtc

SEQ ID NO: 758 - DNA, 870 bp, Homo sapiens
gagtcagactggtcatgcaaggtggtccgcaacatgacctctgagttcttcgctgcccagctctgggcccagatctctgacaacaccactcacacgatctcctactacaagcccaagttctacacgccggatgacaggggcactgctcacctgtctgtcatcacagaggacggcagtgctgtgtccgccaccagcaccatcaacctctactttggctccaaggtctgctccccggtcagcgggatcctgttcaataatgaatggacgacttcagctctcccagcatcaccaatgagtttggggtacccccctcacctgccaatttcatccagccagggaagcagccgctctcgtccatgttcccaacgatcatggtgggccaggacggccaggtccggatggtggtgggagctgctgggggcacgcagatcaccacagccactgcactggccatcatctacaacctctggttcggctatgacatgaagcgggccgtggaggagcaccggctgcacaaccagcttctgcccaacatcacgacagtggagagaaacattgaccaggcagtgactgcagccctggagacccggcaccatcacacccagatcgcgtccaccttcatcgctgtggtgcaagccatcgtccgcacggctggtggctgggcagctgcctcagactccaggaaaggtggggagcctgccggctactgagtgctccgggcagacaaggctgacaagcaatccagggacaagatactcacgaggacgaggaagaggactttgggggacgggcttcccctgtgagcagcagagcagcataataaatgaggccactgtgccaggctccaggtggcctccctggcctgtctcc

SEQ ID NO: 759 - DNA, 2264 bp, Homo sapiens
gcttggttttggtgtgctgctggacgaccagaccgggcgtcgggtgagcccagaagtgagagcagttggctgcgccccagtgctgtgtgacccagaggcgccacacaccctctctgagctggtggacatcataggtggggaagctcagcaggtgcagcccagaactgtcttctgaggaagaggtgctctcctgggcccccactgtccccaggcctcaggagaacgagaaggctgcctgatcagagagtctctgaagaagattctgtggctacaggcttcagcagagtgtgagggagaccccagttatttcctcagctgtttccaccaaatcctcctgtctttcgtggccaacaccccaggcaaggcttggggcccccgtctgctgctggacgcagagccatgaagaagaagttagtggtgctgggcctgctggccgtggtcctggtgctggtcattgtcaatctctgtctctggctgccctcagcctccaaggaacctgacaaccatgtgtacaccagggctgccgtggctgcagatgccaagcagtgctcggagattgggagggacacactgcgggatggtggctctgcggtggatgcagccattgcagccctgttgtgtgtggggctcatgaatgcccacagcatgagcatcgggggtggcctcttcctcaccatctacaacagcacctcaggaaaagctgaggtcatcaatgcccgcgaggtggcccccaggctggcctttgccagcatgttcaacagcttggagcagtcccagaagggagggctgtcagtggcagtgcctggggagatccgaggctatgagctggcacaccagcggcatgggcggctgccctgggctcgcctcttccagcccagcatccagctggcccgccagggcttccccgtgggcaagggcttggcggcagtcctggaaaacaagcggaccgtcatcgagcagcagcctgtcttgtgtgaggtgttctgccgggatagaaaggtgcttcgggagggggagagactgaccctgccgcgggtggctgacacctatgagacgctggccattgagggtgcccaggccttctacaatggcagcctcatggcccagattgtgaaggacatccaggcggccggggcattgtgacagctgaggacctgaacaactactgtgctgagctgatcgagcacccgctgaacatcagcctgggagacgcggtgctgtacatgcccagtgcgccgctcagcgggcccgtgctggccctcatcctcaacatcctcaaagggtacaacttctcctgggagagtgtggagacccccgagcagaagggcctgacgtaccaccgcatcgtagaggctttctggtttgcctacgccaagaggaccctgcttggggaccccaagtttgtgaatgtgactgaggtggtccgcaacatgacctctgagttcttcgctgcccagctctgggcccagatctctgacaacaccactcacacgatctcctactacaagcccaagttctacacgccggatgacaggggcactgctcacctgtctgtcatcacagaggacggcagtgctgtgtccgccaccagcaccatcaacctctactttggctccaaggtctgctccccggtcagcgggatcctgttcaataatgaatggacgacttcagctctcccagcatcaccaatgagtttggggtacccccctcacctgccaatttcatccagccagggaagcagccgctctcgtccatgttcccaacgatcatggtgggccaggacggccaggtccggatggtggtgggagctgctgggggcacgcagatcaccacagccactgcactggccatcatctacaacctctggttcggctatgacatgaagcgggccgtggaggagcaccggctgcacaaccagcttctgcccaacatcacgacagtggagagaaacattgaccaggcagtgactgcagccctggagacccggcaccatcacacccagatcgcgtccaccttcatcgctgtggtgcaagccatcgtccgcacggctggtggctgggcagctgcctcagactccaggaaaggtggggagcctgccggctactgagtgctccgggcagacaaggctgacaagcaatccagggacaagatactcacgaggacgaggaagaggactttgggggacgggcttcccctgtgagcagcagagcagcataataaatgaggccactgtgccaggctccaggtggcctccctggcctgtc

SEQ ID NO: 760 - DNA, 2332 bp, Homo sapiens
agggctgctgggcaccccctggctggtctcttggactagcaggtgcagcccagaactgtcttctgaggaagaggtgctctcctgggcccccactgtccccaggcctcagcaaggcaagtgaggtgctgccatcttccaggctggacagttcagtgatttgcctgaggccccacagcagagttcaactggagacagagaaaccagctagaggcagagggaggtaacccggagtcccccagaaaggtctgggctgtgcgtgcttcaggtaacctcccttgaccttcaggagaacgagaaggctgcctgatcagagagtctctgaagaagattctgtggctacaggcttcagcagagtgtgagggagaccccagttatttcctcagctgtttccaccaaatcctcctgtctttcgtggccaacaccccaggcaaggcttggggcccccgtctgctgctggacgagccatgaagaagaagttagtggtgctgggcctgctggccgtggtcctggtgctggtcattgtcaatctctgtctctggctgccctcagcctccaaggaacctgacaaccatgtgtacaccagggctgccgtggctgcagatgccaagcagtgctcggagattgggagggacacactgcgggatggtggctctgcggtggatgcagccattgcagccctgttgtgtgtggggctcatgaatgcccacagcatgagcatcgggggtggcctcttcctcaccatctacaacagcacctcaggaaaagctgaggtcatcaatgcccgcgaggtggcccccaggctggcctttgccagcatgttcaacagcttggagcagtcccagaagggagggctgtcagtggcagtgcctggggagatccgaggctatgagctggcacaccagcggcatgggcggctgccctgggctcgcctcttccagcccagcatccagctggcccgccagggcttccccgtgggcaagggcttggcggcagtcctggaaaacaagcggaccgtcatcgagcagcagcctgtcttgtgtgaggtgttctgccgggatagaaaggtgcttcgggagggggagagactgaccctgccgcgggtggctgacacctatgagacgctggccattgagggtgcccaggccttctacaatggcagcctcatggcccagattgtgaaggacatccaggcggccggggcattgtgacagctgaggacctgaacaactactgtgctgagctgatcgagcacccgctgaacatcagcctgggagacgcggtgctgtacatgcccagtgcgccgctcagcgggcccgtgctggccctcatcctcaacatcctcaaagggtacaacttctcctgggagagtgtggagacccccgagcagaagggcctgacgtaccaccgcatcgtagaggctttctggtttgcctacgccaagaggaccctgcttggggaccccaagtttgtgaatgtgactgaggtggtccgcaacatgacctctgagttcttcgctgcccagctctgggcccagatctctgacaacaccactcacacgatctcctactacaagcccaagttctacacgccggatgacaggggcactgctcacctgtctgtcatcacagaggacggcagtgctgtgtccgccaccagcaccatcaacctctactttggctccaaggtctgctccccggtcagcgggatcctgttcaataatgaatggacgacttcagctctcccagcatcaccaatgagtttggggtacccccctcacctgccaatttcatccagccagggaagcagccgctctcgtccatgttcccaacgatcatggtgggccaggacggccaggtccggatggtggtgggagctgctgggggcacgcagatcaccacagccactgcactggccatcatctacaacctctggttcggctatgacatgaagcgggccgtggaggagcaccggctgcacaaccagcttctgcccaacatcacgacagtggagagaaacattgaccaggcagtgactgcagccctggagacccggcaccatcacacccagatcgcgtccaccttcatcgctgtggtgcaagccatcgtccgcacggctggtggctgggcagctgcctcagactccaggaaaggtggggagcctgccggctactgagtgctccgggcagacaaggctgacaagcaatccagggacaagatactcacgaggacgaggaagaggactttgggggacgggcttcccctgtgagcagcagagcagcataataaatgaggccactgtgccaggctccaggtggcctccctggcctgtctcc

SEQ ID NO: 761 - DNA, 750 bp, Homo sapiens
cacacgatctcctactacaagcccaagttctacacgccggatgacaggggcactgctcacctgtctgtcatcacagaggacggcagtgctgtgtccgccaccagcaccatcaacctctacgggatcctgttcaataatgaatggacgacttcagctctcccagcatcaccaatgagtttggggtacccccctcacctgccaatttcatccagccagggaagcagccgctctcgtccatgttcccaacgatcatggtgggccaggacggccaggtccggatggtggtgggagctgctgggggcacgcagatcaccacagccactgcactggccatcatctacaacctctggttcggctatgacatgaagcgggccgtggaggagcaccggctgcacaaccagcttctgcccaacatcacgacagtggagagaaacattgaccaggcagtgactgcagccctggagacccggcaccatcacacccagatcgcgtccaccttcatcgctgtggtgcaagccatcgtccgcacggctggtggctgggcagctgcctcagactccaggaaaggtggggagcctgccggctactgagtgctccgggcagacaaggctgacaagcaatccagggacaagatactcacgaggacgaggaagaggactttgggggacgggcttcccctgtgagcagcagagcagcataataaatgaggccactgtgccaggctccaggtggcctccctggcctgtctcc

SEQ ID NO: 762 - DNA, 2222 bp, Homo sapiens
ccaggctggatctctgtgagaggcctgcctgtcctgcaccctgtgcggatgcctcccactgtccaccagggctgctgggcaccccctggctggtctcttggactagcaggtgcagcccagaactgtcttctgaggaagaggtgctctcctgggcccccactgtccccaggcctcaggagaacgagaaggctgcctgatcagagagtctctgaagaagattctgtggctacaggcttcagcagagtgtgagggagaccccagttatttcctcagctgtttccaccaaatcctcctgtctttcgtggccaacaccccaggcaaggcttggggcccccgtctgctgctggacgcagagccatgaagaagaagttagtggtgctgggcctgctggccgtggtcctggtgctggtcattgtcaatctctgtctctggctgccctcagcctccaaggaacctgacaaccatgtgtacaccagggctgccgtggctgcagatgccaagcagtgctcggagattgggagggacacactgcgggatggtggctctgcggtggatgcagccattgcagccctgttgtgtgtggggctcatgaatgcccacagcatgagcatcgggggtggcctcttcctcaccatctacaacagcacctcaggaaaagctgaggtcatcaatgcccgcgaggtggcccccaggctggcctttgccagcatgttcaacagcttggagcagtcccagaagggagggctgtcagtggcagtgcctggggagatccgaggctatgagctggcacaccagcggcatgggcggctgccctgggctcgcctcttccagcccagcatccagctggcccgccagggcttccccgtgggcaagggcttggcggcagtcctggaaaacaagcggaccgtcatcgagcagcagcctgtcttgtgtgaggtgttctgccgggatagaaaggtgcttcgggagggggagagactgaccctgccgcgggtggctgacacctatgagacgctggccattgagggtgcccaggccttctacaatggcagcctcatggcccagattgtgaaggacatccaggcggccggggcattgtgacagctgaggacctgaacaactactgtgctgagctgatcgagcacccgctgaacatcagcctgggagacgcggtgctgtacatgcccagtgcgccgctcagcgggcccgtgctggccctcatcctcaacatcctcaaagggtacaacttctcctgggagagtgtggagacccccgagcagaagggcctgacgtaccaccgcatcgtagaggctttctggtttgcctacgccaagaggaccctgcttggggaccccaagtttgtgaatgtgactgaggtggtccgcaacatgacctctgagttcttcgctgcccagctctgggcccagatctctgacaacaccactcacacgatctcctactacaagcccaagttctacacgccggatgacaggggcactgctcacctgtctgtcatcacagaggacggcagtgctgtgtccgccaccagcaccatcaacctctactttggctccaaggtctgctccccggtcagcgggatcctgttcaataatgaatggacgacttcagctctcccagcatcaccaatgagtttggggtacccccctcacctgccaatttcatccagccagggaagcagccgctctcgtccatgttcccaacgatcatggtgggccaggacggccaggtccggatggtggtgggagctgctgggggcacgcagatcaccacagccactgcactggccatcatctacaacctctggttcggctatgacatgaagcgggccgtggaggagcaccggctgcacaaccagcttctgcccaacatcacgacagtggagagaaacattgaccaggcagtgactgcagccctggagacccggcaccatcacacccagatcgcgtccaccttcatcgctgtggtgcaagccatcgtccgcacggctggtggctgggcagctgcctcagactccaggaaaggtggggagcctgccggctactgagtgctccgggcagacaaggctgacaagcaatccagggacaagatactcacgaggacgaggaagaggactttgggggacgggcttcccctgtgagcagcagagcagcataataaatgaggccactgtgccaggctccaggtggcctccctggcctgtc

SEQ ID NO: 763 - DNA, 948 bp, Homo sapiens
gctctggggtctcggcaggtggtccgcaacatgacctctgagttcttcgctgcccagctctgggcccagatctctgacaacaccactcacacgatctcctactacaagcccaagttctacacgccggatgacaggggcactgctcacctgtctgtcatcacagaggacggcagtgctgtgtccgccaccagcaccatcaacctctactttggctccaaggtctgctccccggtcagcgggatcctgttcaataatgaatggacgacttcagctctcccagcatcaccaatgagtttggggtacccccctcacctgccaatttcatccagccagggaagcagccgctctcgtccatgttcccaacgatcatggtgggccaggacggccaggtccggatggtggtgggagctgctgggggcacgcagatcaccacagccactgcactggtatgcgtcaccccttttctccctggccctgcccactccgcacagcccccaagccatgctgatcacactcccatgccccaggccatcatctacaacctctggttcggctatgacatgaagcgggccgtggaggagcaccggctgcacaaccagcttctgcccaacatcacgacagtggagagaaacattgaccaggcagtgactgcagccctggagacccggcaccatcacacccagatcgcgtccaccttcatcgctgtggtgcaagccatcgtccgcacggctggtggctgggcagctgcctcagactccaggaaaggtggggagcctgccggctactgagtgctccgggcagacaaggctgacaagcaatccagggacaagatactcacgaggacgaggaagaggactttgggggacgggcttcccctgtgagcagcagagcagcataataaatgaggccactgtgccaggctccaggtggcctccctggcctgtctcc

SEQ ID NO: 764 - DNA, 1095 bp, Homo sapiens
tgcagcaagggtctggaggctgaggaccaggcagacagacattcagagttgctgaaacgcaacagagacagggagtcagactggtcatgcaaggtcctgggcctgcccttgggtcctggggagccacggaaggttgtgggtgccagagggttttggtcagagtcacagtcaggggccttctgagacctgtgccccctccccaccctccctccccacctcctcaggccagctctggggtctcggcaggtggtccgcaacatgacctctgagttcttcgctgcccagctctgggcccagatctctgacaacaccactcacacgatctcctactacaagcccaagttctacacgccggatgacaggggcactgctcacctgtctgtcatcacagaggacggcagtgctgtgtccgccaccagcaccatcaacctctactttggctccaaggtctgctccccggtcagcgggatcctgttcaataatgaatggacgacttcagctctcccagcatcaccaatgagtttggggtacccccctcacctgccaatttcatccagccagggaagcagccgctctcgtccatgttcccaacgatcatggtgggccaggacggccaggtccggatggtggtgggagctgctgggggcacgcagatcaccacagccactgcactggccatcatctacaacctctggttcggctatgacatgaagcgggccgtggaggagcaccggctgcacaaccagcttctgcccaacatcacgacagtggagagaaacattgaccaggcagtgactgcagccctggagacccggcaccatcacacccagatcgcgtccaccttcatcgctgtggtgcaagccatcgtccgcacggctggtggctgggcagctgcctcagactccaggaaaggtggggagcctgccggctactgagtgctccgggcagacaaggctgacaagcaatccagggacaagatactcacgaggacgaggaagaggactttgggggacgggcttcccctgtgagcagcagagcagcataataaatgaggccactgtgccaggctccaggtggcctccctggcctgtctcc

SEQ ID NO: 765 - DNA, 2727 bp, Homo sapiens
cattgccagagagctagtgtgatcctttggtagtgtcactacattcagatttctcatggtgctagaattcttgtgtgggtccttctcatctggagatgctagcacttctaatttgtgtaattatttttgtttgggtaggattttttctttttctttccttttctataatattattgttatttttttcttctttccctttccctcctccctaggggtgtggctgtagagcatgctgggtagggtcttttggctttgcttctgtagccctaatgcacttctgccagcaggttttatattgggtgtgtggtttgacctacaagccagtagatggcgccatgggtaagagctggctgttgccagtgctgctggctgtgtacttgatccttgtttattgggaggagctttctgctgccccaggaatgggctgatttcctgagtacacattaatctgagctccctcagccctaggggtagggggattgggggcacaagatgggtggagccagatagggaagattcccccagtgttgtcctgctcccagtccaggtttgggacaatgccagcagcgtttccctgtgtctttcccccacaaagtctccaagtctctcctcaaatgagctccaaggcttgggagaaacaatctcttcctctgcccgggttgcgtggatctccagtggaaaggtgagacagagggatgctgtctgcctctctcacttactgaggcttcactcacttctatcagtcgaatgctgtcctgagggctgcttgcctgcaatgtcctccgcaagatctgggatgtccttcataattccggggaattgccatttcctttcttgaattaaagctcacagagttggtctttatgtacttgcttgctatttccaaatgactgaggcatgctaaaagcctgtaatctgccatcttggaaaaaacatccttgcatccttaagagaaatggcacttggtgttgatacatggtgtttctacattgctgaattcactttgaaaatatatgtatattttaaaatctacatttatatgtgagactggtgtaaaaatatcttttattctactgtatttgtgcaattttggaatcagttatattaatatactaaatgagttggcaatttttcttttttactattatccaaaaaaattataaaagacataattgttgctttcttatagatttagtaaaaacctcatcgtgtccttttgtggagcgatggtgagagatatttttactgtaaatgtaacttgcgtatttttcacctgtgaggcagaggttgcaatgagccaagattgtgccactgcactccagcctgcgtgacacagcaagaccctgtctcaaaaaaaagaaagaaaatcaacttaaaatgcactccttgaatatttctgagtgtatttttataccacgtatgttccttgaactaacttcttttcttttctaggaagaaccggaactatgatttgtgccttccttattgcctccgaaatatttttaactgcagaggaaagcctgtattattttggagaaaggcgaacagataaaacgcacagcagtaaatttcagggactagaaactccttctcagtagagacaaggtttcaccctgttggcgaggctggtctcaaactcctgacgcccagtgatctgcccacctcggcctcccaatgtgctgggattacaggcgggagccaccatgatggccaacttttgaattctgaaccagttgattgagtaccagagctcttcaataccttgaagaaagattcaggggagagccgttgtgaacagcttgccccagggaaaggacaaggctgagagaattccagggcttccttgagaaaacagaattgaggaaatgcaaagtgaagaattctagcatcaggaacaagagaagaatgatggaaaacctgctactgagatatgttggatattttgcacaagtgaaacatctctacaactggaatctccctccaagacggatactctttataataagattcattatttattcgattcgtggtgttggaacaggcgatgtatgtgatctaaaattccaaatagtaatggagaaaaagatactgcatgacattgaaacagctggtgtattaactaatgtatatgacagtccatctctgtacgatgatgtgaaagtgcagtttttctcttcaaatcttcctaaatactatgacaattgttcatttttcttctggttcaacacatcttttattcaaaataacagagagaaatttagatattttattaaacttggaagtcattaatgccatataaagcaatgctaagagagtcagcatgtgttactgatgtgttgctgaagattaaagtatttttaagtctcaccaaaaaggtggaaggagccaactgagacacaaaaaaggggctgaggttctattcacggctttatctaccaagaaatgaattggataatccacatcaacaaaaagcatggaaaatttatccaccagaatttgccgtggagatactttttggcgagaaatgacttccaatgacgtagctggatccgattaagtatagtttccccttccccttctgggaaagaattaatgttctttccaacccctgccatgtgcatgttcatatgtcctaagtcttccttgatgatgtatctatatttatatatgtttatatatgttcttcataaatctattaaatatatatagataaaaaaaaaaaaaaaa

SEQ ID NO: 766 - DNA, 1918 bp, Homo sapiens
atgcccagatgtgaggggcagatgaagggaatgttgctggaaaggtgccttttaaggctgctgagaatttctggactgtgtcctgatggacgcagcaccatcaaagcccagaatttctgaaaacggtgacaaggttaacataaggacaacaaatactccaccctgtcatggtatgtgaggtgtgggtgtggcggtttctgtgtacgtttgctcatacacgcacatccaaaagcctgtgcctcattcctggccatgggtgaggacttggtctgtcacggctgatgaggactcccacaaccggccaagttatgtcttattatacacccccagaaagagagaaagctgccttctggaggactgattccacatgctatattcagctgagttgatttctgtgtctatttcaacccataacctgaagaatgatcaccttattccttattcattaattttcttgattaatagggaaacttgggaatagctataaagtaaaacttgggtggaacctggggccctggcatcacacaagtgtgattaggatggtcaaggtcatcaggagtacagcctattatattcccacatcctgagaaaggtcatttctcccacacacgacaaagtcacagacatcctgcacctgccactaggcatcctcatcctactgacatgcccatttctccagttttcttaatctgagactcccttcccttgttttttaaagataccgtgcttctccacatcctcatccttcaaggagcatattttgctcttaggatggtctttgggattcaagaatagaataataaatccaaacttggtcattcccattttgaagagatgcaagagggcccagtgaggacatccgcctccctgaaagtggtgctagacagagctgaggtcattgtatctgtgtatccacataggatttctcttaattcagcttgaattgatggggagggaggtaagagtagggtcagagttactcatcccttttcaaagaattgtgggtggaagtttgtaaaggccattcatttgattttcaaaatcaaagcgacagctctacttccacttggccttagatctctgctataccctgccatagccttgatgccactgggcacaagccacctgccaaatacaggagtggcctctcccagcctggcatgataggggggtctgtgccctcagatgtgttgacagctgctcttctgaattgccacacctgtgctacacttggaattctgtgctctgactctgcagggtaggaccacgtgccatctcacacagaggtcaaccgatgagcccactcactcgtacatgccttcttccacagtgggaagcatgatctggcaggggccgccctgtaggctggggatgggctgctgtgtgaatgttgacgttcgtttcatggagaaaggggaggtgaaagattgaagagcaggttcctgtcaatgttctgagttcgagctggaggtgtagattgaatagtctacatggtctgtgagtgtgtgagatgaacccttccatcctttgacacctggttgtatgtgtaggctaagaaggaaggaccctcctgtcagtgtgcaaagctgtaatctcatggactagaggagagggggccaaggggatggacaggagaagtcatgcagaatctaagcaggaatgcagatagaacacatctaggctcttttccccaggagagtgatgatggagcatatagatctggctcaaattcagcctccatcacttaccagtcaggaaccctggcgatatcactttaactttctgaacctcagagtcttcacctataagacggggaaaataataccaccctttcaagattgttgagataaataagtgatataaaacatgtaaagcttagttctggccacagtgtagctactcaataaatgataatact

SEQ ID NO: 767 - DNA, 1918 bp, Homo sapiens; identical to SEQ ID NO: 766

SEQ ID NO: 768 - DNA, 2325 bp, Homo sapiens
cgcccggcagggttgtttcttaaaggtaaataagctccctaaatttgtctgtaaattggaagtaactccagtgaaaatgccaacaggaatttttttttggcttgacaaactaaggctaaaattaatatagaaatgagcatacaataataggaacactatgaaaaagaagagtaatgagaggtgggaccaagtctataagatattaaagggtaagtctctccggcccggtttccctcggtgtgctactgtgcgcgcgatccagcaccatggggaagcgggacaatcgggtggcctatatgaacccaatagcaatggcgagatcaaggggtccaatccagtcttcagggccaacaatacaggattatctgaatcgaccaaggcctacctgggaagaagtaaaagagcaactagaaaaggaaaagaaaggctccaaggctttggctgaatttgaagaaaaaatgaatgagaactggaagaaagaactggaaaaacacagagagaaattgttaagtggaagtgagagctcatccaaaaaaagacagagaaagaaaaaagaaaagaagaaatctggtaggtattcatcttcttcttcatcaagctctgattcttccagcagttcttctgattctgaagatgaggataagaaacaaggaaaacagagaaagaaaaagaagaaccgttactgaatcagacagtaaggatagtttaaaaaagaaaaagaagtcaaaagatggaactgagaaagaaaaggatattaaaggactcagcaaaaagagaaagatgtattctgaagataaacctttatcatctgagtccttgtcagaatcagagtatattgaggaggtgcaagcaaaaaagaacaaaaaaaaaaaaaccccacaaagtcaaaagacaagtttgaaaaatgtttacagctccacaaagatagacaaatttccttgatgtatgaaaaatgtcaacaaaccaataaaaagactaacaattcagtagaaaaatggacaaagaacaaatatggagattcatagaaatgagagataaatgtacatgatgagaaggtgaggtgctcacttgatttataagagaaatgaaaattaaaactacaccagatgccattttttaaaaacctattacattgatgaaaataaaaatttagcaaattgttagcctgaatggggagataggtacttgaattttgtgtgggaatgtaaattaggacagtctttatggaggataattttatagaatccatcagatttataaatgcacagacctatttgacccaacaatttaacatccagatttttatcttatgccaaactgaaatgaagaatggccaagttttattgaggcatcatttatagtagcaaaacactggaaacaagctaaatgttcattatagaagactggttaaataaaaatttgtccatcgaagatggagtagcatgtagttattaaaaaagaataaggaaaatactgatagaggatgatgtagatattaaatggggaaaaaagtaaaactccacaagatgtagaacagtatatgtgttttgctgccgtttgaggagaaaggagaaaatacagaaatatttatatgttgcttatgtatgcatacaacatttgtggatggattcacaagaaaatggtagccttaatttaccttgagacaaactgagggacaaggacaccctttaatacctttcagatatttttttttttttgagacagggttttgctcttgttgcccagcctggagtgcaatagcgtgatctcagctcaccacaacctccgcctcccaggttcaatcggttttcctgcctcagcctcccaagtaggtgggattacaggcatgcgccaccacgcctggctaattttgtatttttttagtagagatggggtttctcatattggtcaggctggtcttgaactcctgacctcaggtgatctgcccacctcggcctcccaaactgctgggattacaggcgtgagccaccacacctggctaccctttcagttttaagccataataaaaattacatgaaattgggctgggcacgatggctcactcctgttatcccagtgctttaggaggctgaggcaagaggatcacttgaggccaggagttccagaccagcctgggtaatgtagcgagaccctgtctctacaagaagataaaaaaattagctgggtgtcgtggtgcgtgcctataatcctagctactcaggtggcggaggtgagaggattgcccgaacccaggagtcaaaagctgcagtgagctactgtgatcatgcctctctactccagcctgggcaatagggtaagatcctg

SEQ ID NO: 769 - DNA, 1807 bp, Homo sapiens
gcggccgcctgtccagcctctgggaggctctggcatccgagtggtgtgaccacatggctggcttcctccccctgccctcctcaggccctgactcactggggttttgtgctcggactcaaagagctccattgacagcggggctggggtcggtttctctccacacagcctagcctgctgggaggcacaaccaggcaaatgtcacagggcccggcccctggactctggagccctgccctgacagctgggccaggagtgcggtcacagccccagcagaaggccctcacctcacaaggaacatgaggcgccttgccgggcgcgcaggccactcccaggtcactcaggattccaagttctcccccaagacgccttcagatgctgagcggcacaagggcctccccagggactggttgcaaagcctcctgctcagcttgagagggccaccagctccccactgtttactgttgttcctgagagaggccagagggagggaccagccagggagtggccagagggacagaaggggtggccttcctgagggcagggtgggtgccccagacctgagagcgctgcaggactcccctccacaggctcaggtggagcctccccagggtcctcctggccaggaaggcagagagccgacttctttcttcagctcccaacccaggcccagcccacggcgtgggagtcggggagagggagaggaggaggaaggaggaggagagagggagcttgtcttgtccctgagcagcgctctcagggcagaggtgaggcaccgggacatgaagttggaggacaagttcccaagcagggcttcctcgggctccccctcgcgacggtaatttgacacttggatctccaggacgaccaacaacaaaaaagccaggcagagacagcagctggctgtcagcagaggagctgggctgaggcgcccaggggagcagcggcgcccacgaaggaagtacgaggacagcacgtggaggctccgcgctggggcactgctgctcagcccccaacacctgagctcccagagcccggcaggagccccaacaggaagccagcgcggcatggctgccaccgacttcgtgcaggagatgcgcgccgtgggcgagaggctgctgctcaagctgcagagactgccccaggctgagcccgtggagatcgtggccttctcagtcatcatccttttcacagctactgttctgctgttgctgctgatagcctgcagctgctgctgcactcactgctgctgccctgagcggagaggcaggaaggtccaggtgcagccgacaccaccatgacggacgggcgatggctgaggagaagctggagaggagatggccaatgccatgacacaggccatcagcctggccctgcagcccttacccctcaagaccaggctcccctggccccagctctggcccagcccaggtacctggacactgacaacttgagccctaccaaggaaacaagggctggtataggtgcaaacctctcatctgccagtggacactgggtgctggggagtcagctgtttcaaagactgggtcaactgcctgggcttcttcgcctacctgcactttttaacaaaacaaggaagtaggggtccccataccttgatggagaacagtccccacctgtgggcaattggcccttggggctctgctgatacatgccaaagaggagcaaggcaatcagaggggctttgtgcaatagcttctgcatccgagctcccgccagagcgtgagcatgtcagtattctagtccagtatttgccagtttccaagtaaaagcttttgtgttacgtgtt

SEQ ID NO: 770 - DNA, 1807 bp, Homo sapiens; identical to SEQ ID NO: 769

SEQ ID NO: 771 - DNA, 4521 bp, Homo sapiens
ttcctcctgccaaacctaggaagggaaaggggaggagaggtggccagcctcagagctcccatgttcccctcgccacagctgggaacactaaggttcccttaggagcagcggctggggcacatgccacacagtcacctgacggctgctggttatattgggcaccaagtgtcaggcactccttggcctggctttaaatagcccgctgggaagaccacctggggaccggctggaatgcgcctcctcctctttagagaacaggacccctcagctcccccacctgcgccatgaaggttcagtcgcgggtttacgctccaaatgacaagatatcaactgcaaaacaaagggggtcccggggttcctctccagctctctgggggcagaacagccacgtccaacggtcctacttctgctcactgtgtgacaggataccgtgagtacccctgggtcagaccctggggctgggtgaggctggccatgcctggctggcaaattcagcttccagtcagccccctagggaagccctgggcgcaaagctatgacactgtccacagccgcagcctgctgctgctgggaactgacacttttccccgctggaggccggggtccacccggcatgagtctgcagctctcccactttgcagcccctggaggaggctggccagagcttctcagcaacaaaccccacttttcctgcaccagtaaattcagcctcagtccaaccttcctcctccctgttctggtgagcacagccccaggtctctcgctcacaaggaaaagtgccccctgcaatctctccctgggtctctgggtgtggcacaagcgaaaaagctctccctgcccgctccctctttgaaggagtgtctctgctgggctacattaggccgtgtgggcacagtgccagtcaggctgaaaacgccagaccaagtgtagacagagagggaggggagaaaggcagcccagctcctgaaccacgcgcaaactgtcccgtaagggacactgtcggcattgtcgtccctctaagaatgagggaacctggaaagctggggcgtgaggatggcacggaggtcccggaaccaagaggggaccactgtccttgtgcaagcctgctccacctggccagagagaatgtcccattcagtctgaccagagggttcagtcctacactcaggctggctagactcacaagacctgtacctgtggtgacaaggactccaggtagtctcaaagagcctggtgtggccccggcctggtggtgatatgctgataaaagcagcttcagatccacaaatgtgggctggggctggccgagcacagccagctggcttccagggggctctcgggccctggctcctgtactgagcccactgcacgggcagtaccctcagcggggctgctcctggctatcttgctggtctaagctggagacaggcctccatggagagacagcgtggggcaccagtgggggtgctggctggggccctgtcctgctgtgtaacctcagagaagttgcttgctctctcgggtctcagcttccccacgtatagaaggaaggaggcgggagcggatgatctatagcattctaggaccctatgcctctcagtacatttgaaaactgagatcctcacctccacagaaacgcactcactccaggtgaggtgtgagaagctgggtggatctaactcagggaacccacggcttttgacaagaactcatctaattttccacggagccatcttctgcctgctaccctcatcatcacttaaaaaaacagctccccaggccgggcgcagtggctcacacctgtaatcccaacactttgggaggccgagggcggatcacctgatgtcaggagttcgagaccagtctggctaacatggtgaaatcctgtttctactaaaaatacaaaaattagccgggcatggtggcgcacactcgtgatcccagctactcgggaggctgaggcaggagaatcacttgaatctgggaggcagaggttgcagtgagctgagatcatgccattgcactctagcttgggcaacaagagagaaactccatctcaaagaaaaccaaaaccaacaacaaaaacatagctccccacctccagcttgcctaccttccttcagggcacacaccgcagacaccctaggacagacacccaaaaggtgttgggggtgctagtgacggtgcacgggggtgacagcccccaaagccagtgagacccgtcccgggggggcattctcgtgtgccgggcacccccctatggctgtctacaatgtgctgctagatggtcagtcctcccaatagcctcaaaacacgggcatctcattccatatcagagacatgaagcaacctgttcatgtcacaaaaggaagaagtggaggtggcattcaaggaggagcagctgaaaacactagagcaggcccctggcagagaaggaaatccagaaggtacatgccggctgccatcttgctcctgaagggctacgaggcagaagagggggcaaggtctaagtgaccacaagtgggactaactgggggccagcagggagtccgaccttctgcagtgggtgggctgcctcagcaggcggaggttcctcaccatcctgggtgctcatgcaaagaccacatggcctcaaggatggccgcaggccaattgcagggtggagggccccgttcgatgaccttcacggtggttctaaaccagctctgccaaggcagcggcaccgggagtgactggcctcactgacgtagccatctcagcgagaaccggctgagacctgggacaaggcaacgataattacagccaaaggtctggcaccagcccctggccacctgtccccaccaccacccctggattagagcaactgccttggtgaactggatcaggctgggttgggacaaggttgtctctggctcctctctaaagaggcaccagctccctcatgcccacaggagaggcagaaggggaaagccttctggagtggcaccttgggcctcttgggcaccctgagacaggaagaggctctcctggggcaggggtgggagtggagaggactttcctggtcaggctagagaaacagatgacgccagcaggggaggggctggcttgagcaacctgggcctcctgaccccctcccaacagacaggacagaaaccctggcaaaacctggagggacacggtgcggcctccccctctggcagaacaggcatgagtgtagaaactgggctggtgggagaggttggggggcctgggggacaggggggcagttttcacctctgactgaccctggccagaagccccatgaacctgctctcgggagaacctgctccttctgtccccacattgatggaaggcaagagtaccagcttggcatcctatcccagtctccccaccccgagggagctgtgccagtcccaagcacccaggcaaaacccagtagtggtacctcaagacaagggaatggaacagcgaagccagaaaccaccaccagccgccgccttggccggcagcccccgaagcaagcccttggtctcactgtcctcaccggcttcctccaccctgagctgtgtcagctgggtggggactgagggccaccactaggtggaagtcaccaggggtgcaatgtgtgagacctgacaaacttgttctgcgggctgcggatgggtgcgagggtggaatctcggtgctgcgacgagtgtggggccagccgtggaggctccaggtgttctctctgccccagcagagcccggcaggagccccaacaggaagccagcgcggcatggctgccaccgacttcgtgcaggagatgcgcgccgtgggcgagaggctgctgctcaagctgcagagactgccccaggctgagcccgtggagatcgtggccttctcagtcatcatccttttcacagctactgttctgctgttgctgctgatagcctgcagctgctgctgcactcactgctgctgccctgagcggagaggcaggaaggtccaggtgcagccgacaccaccatgacggacgggcgatggctgaggagaagctggagaggagatggccaatgccatgacacaggccatcagcctggccctgcagcccttacccctcaagaccaggctcccctggccccagctctggcccagcccaggtacctggacactgacaacttgagccctaccaaggaaacaagggctggtataggtgcaaacctctcatctgccagtggacactgggtgctggggagtcagctgtttcaaagactgggtcaactgcctgggcttcttcgcctacctgcactttttaacaaaacaaggaagtaggggtccccataccttgatggagaacagtccccacctgtgggcaattggcccttggggctctgctgatacatgccaaagaggagcaaggcaatcagaggggctttgtgcaatagcttctgcatccgagctcccgccagagcgtgagcatgtcagtattctagtccagtatttgccagtttccaagtaaaagcttttgtgttacgtgtt

SEQ ID NO: 772 - DNA, 4521 bp, Homo sapiens
ttcctcctgccaaacctaggaagggaaaggggaggagaggtggccagcctcagagctcccatgttcccctcgccacagctgggaacactaaggttcccttaggagcagcggctggggcacatgccacacagtcacctgacggctgctggttatattgggcaccaagtgtcaggcactccttggcctggctttaaatagcccgctgggaagaccacctggggaccggctggaatgcgcctcctcctctttagagaacaggacccctcagctcccccacctgcgccatgaaggttcagtcgcgggtttacgctccaaatgacaagatatcaactgcaaaacaaagggggtcccggggttcctctccagctctctgggggcagaacagccacgtccaacggtcctacttctgctcactgtgtgacaggataccgtgagtacccctgggtcagaccctggggctgggtgaggctggccatgcctggctggcaaattcagcttccagtcagccccctagggaagccctgggcgcaaagctatgacactgtccacagccgcagcctgctgctgctgggaactgacacttttccccgctggaggccggggtccacccggcatgagtctgcagctctcccactttgcagcccctggaggaggctggccagagcttctcagcaacaaaccccacttttcctgcaccagtaaattcagcctcagtccaaccttcctcctccctgttctggtgagcacagccccaggtctctcgctcacaaggaaaagtgccccctgcaatctctccctgggtctctgggtgtggcacaagcgaaaaagctctccctgcccgctccctctttgaaggagtgtctctgctgggctacattaggccgtgtgggcacagtgccagtcaggctgaaaacgccagaccaagtgtagacagagagggaggggagaaaggcagcccagctcctgaaccacgcgcaaactgtcccgtaagggacactgtcggcattgtcgtccctctaagaatgagggaacctggaaagctggggcgtgaggatggcacggaggtcccggaaccaagaggggaccactgtccttgtgcaagcctgctccacctggccagagagaatgtcccattcagtctgaccagagggttcagtcctacactcaggctggctagactcacaagacctgtacctgtggtgacaaggactccaggtagtctcaaagagcctggtgtggccccggcctggtggtgatatgctgataaaagcagcttcagatccacaaatgtgggctggggctggccgagcacagccagctggcttccagggggctctcgggccctggctcctgtactgagcccactgcacgggcagtaccctcagcggggctgctcctggctatcttgctggtctaagctggagacaggcctccatggagagacagcgtggggcaccagtgggggtgctggctggggccctgtcctgctgtgtaacctcagagaagttgcttgctctctcgggtctcagcttccccacgtatagaaggaaggaggcgggagcggatgatctatagcattctaggaccctatgcctctcagtacatttgaaaactgagatcctcacctccacagaaacgcactcactccaggtgaggtgtgagaagctgggtggatctaactcagggaacccacggcttttgacaagaactcatctaattttccacggagccatcttctgcctgctaccctcatcatcacttaaaaaaacagctccccaggccgggcgcagtggctcacacctgtaatcccaacactttgggaggccgagggcggatcacctgatgtcaggagttcgagaccagtctggctaacatggtgaaatcctgtttctactaaaaatacaaaaattagccgggcatggtggcgcacactcgtgatcccagctactcgggaggctgaggcaggagaatcacttgaatctgggaggcagaggttgcagtgagctgagatcatgccattgcactctagcttgggcaacaagagagaaactccatctcaaagaaaaccaaaaccaacaacaaaaacatagctccccacctccagcttgcctaccttccttcagggcacacaccgcagacaccctaggacagacacccaaaaggtgttgggggtgctagtgacgatgcacgggggtgacagcccccaaagccagtgagacccgtcccgggggggcattctcgtgtgccgggcacccccctatggctgtctacaatgtgctgctagatggtcagtcctcccaatagcctcaaaacacgggcatctcattccatatcagagacatgaagcaacctgttcatgtcacaaaaggaagaagtggaggtggcattcaaggaggagcagctgaaaacactagagcaggcccctggcagagaaggaaatccagaaggtacatgccggctgccatcttgctcctgaagggctacgaggcagaagagggggcaaggtctaagtgaccacaagtgggactaactgggggccagcagggagtccgaccttctgcagtgggtgggctgcctcagcaggcggaggttcctcaccatcctgggtgctcatgcaaagaccacatggcctcaaggatggccgcaggccaattgcagggtggagggccccgttcgatgaccttcacggtggttctaaaccagctctgccaaggcagcggcaccgggagtgactggcctcactgacgtagccatctcagcgagaaccggctgagacctgggacaaggcaacgataattacagccaaaggtctggcaccagcccctggccacctgtccccaccaccacccctggattagagcaactgccttggtgaactggatcaggctgggttgggacaaggttgtctctggctcctctctaaagaggcaccagctccctcatgcccacaggagaggcagaaggggaaagccttctggagtggcaccttgggcctcttgggcaccctgagacaggaagaggctctcctggggcaggggtgggagtggagaggactttcctggtcaggctagagaaacagatgacgccagcaggggaggggctggcttgagcaacctgggcctcctgaccccctcccaacagacaggacagaaaccctggcaaaacctggagggacacggtgcggcctccccctctggcagaacaggcatgagtgtagaaactgggctggtgggagaggttggggggcctgggggacaggggggcagttttcacctctgactgaccctggccagaagccccatgaacctgctctcgggagaacctgctccttctgtccccacattgatggaaggcaagagtaccagcttggcatcctatcccagtctccccaccccgagggagctgtgccagtcccaagcacccaggcaaaacccagtagtggtacctcaagacaagggaatggaacagcgaagccagaaaccaccaccagccgccgccttggccggcagcccccgaagcaagcccttggtctcactgtcctcaccggcttcctccaccctgagctgtgtcagctgggtggggactgagggccaccactaggtggaagtcaccaggggtgcaatgtgtgagacctgacaaacttgttctgcgggctgcggatgggtgcgagggtggaatctcggtgctgcgacgagtgtggggccagccgtggaggctccaggtgttctctctgccccagcagagcccggcaggagccccaacaggaagccagcgcggcatggctgccaccgacttcgtgcaggagatgcgcgccgtgggcgagaggctgctgctcaagctgcagagactgccccaggctgagcccgtggagatcgtggccttctcagtcatcatccttttcacagctactgttctgctgttgctgctgatagcctgcagctgctgctgcactcactgctgctgccctgagcggagaggcaggaaggtccaggtgcagccgacaccaccatgacggacgggcgatggctgaggagaagctggagaggagatggccaatgccatgacacaggccatcagcctggccctgcagcccttacccctcaagaccaggctcccctggccccagctctggcccagcccaggtacctggacactgacaacttgagccctaccaaggaaacaagggctggtataggtgcaaacctctcatctgccagtggacactgggtgctggggagtcagctgtttcaaagactgggtcaactgcctgggcttcttcgcctacctgcactttttaacaaaacaaggaagtaggggtccccataccttgatggagaacagtccccacctgtgggcaattggcccttggggctctgctgatacatgccaaagaggagcaaggcaatcagaggggctttgtgcaatagcttctgcatccgagctcccgccagagcgtgagcatgtcagtattctagtccagtatttgccagtttccaagtaaaagcttttgtgttacgtgtt

SEQ ID NO: 773 - DNA, 2391 bp, Homo sapiens
caggtctcccaggcttcctcagcgtcgacgccggggagcgccctggggttgggagcgcccggggcccgcgaaggaggaggtggctcaggtgtcagggcgcaccgtgggaaccggccccgggggaggcgtggaaacgcggggcctgggactcgaccagcctctcccgtgcggatcgcaaaatctcggagctgaaacagcccgttgttcgcagcctccctctgacccgccaccctgcacattgttttccattcgcccgggtcgcgggtgggaggagaggcacgccggggttctggagcttggccgcgcgccaggcttgtggccttcgtccccctggggccactggggcggccacgcctctccggcgggaggagagaacgcgtgggtccgggtggctgctccggcccttccgcctccagctcggccatggggtcgcgcagctcccacgccgcggtcattcccgacggggacagtattcggcgagagaccggcttctcccaagccagcctgctccgcctgcaccaccggttccgggcactggacaggaataagaagggctacctgagccgcatggatctccagcagataggggcgctcgccgtgaaccccctgggagaccgaattatagaaagcttcttccccgatgggagccagcgagtggatttcccaggctttgtcagggtcttggctcattttcgccctgtagaagatgaggacacagaaacccaagaccccaagaaacctgaacctctcaacagcagaaggaacaaacttcactatgcatttcagctctatgacctggatcgcgatgggaagatctccaggcatgagatgctgcaggttctccgtctgatggttggggtacaggtgacagaagagcagctggagaacatcgctgaccgcacggtgcaggaggctgatgaagatggggatggggctgtgtccttcgtggagttcaccaagtccttagagaagatggacgttgagcaaaaaatgagcatccggatcctgaagtgactccgtttgtgccttgggcttgctcctgcaaccagtatctccttggaattcatccaaagcccccatggacgcatggacgcagggcgacaataaactgtattttcgtttctaactctatttagggccaagagaagaaagctggaaggatgtgtactaaagtctagctcagcagtccccaacctttttggcatcagggacagtttttccacggatgggtgacaggggatggttttgggatgattcaagtgcattacatttattgtgcactttatttctattatgattacattgtaatatataatgaaataattatacaactcaccataatgtagaatcagcaggagccctgagcttgttttcctgcaattagacggtcccatatgggagtgatgggagacagtgacagatcatcaggcattagattctcataaggagtgcacaatctagatcctttggtgtgcagttcacagtaggatttgggctcctatgataatctaatgccactgctgatctgacaggaggcagagctcaggcggtaatgcaagcaatggggagtggctgtaaatatagatgaagcttcagctcgcctgccgctcaccttgtgctgtgcagcccggttcctaacagaccacagaccccacaccaggtctatctcatttggtctcagagctgtgaatcagccagcaatattttagttgcaaatcactgaaaacccaactcaaagtgacttaagtcagaaagaaattttatgaattcaggtaattaaaaagtccagaagtatctgcctttaggcacagctggatccaagggcacaaatgatgtcatcaggctccagttattctccatctcccagctcagctttttctgtctgtaagcctgattttcaggaaggctctttcctagtgatggagatgaccaccatcagctccaggcttctatcctgctaacccagtaacccagtgggaagagatttacttattccaataattccaagtggagagtgtcattgacccgtttggggtctcatctctacttctaggggaatgaaacactttgagtggccaggcctgtgtcatgtgctaattcctagagccagggaaataaggtctgaggattcaggatggggtgaaaggtggttgcttaaaggaaaatgaaatacaattagcagaataaggggaaacgagtggtctgctctgctcgggcaaaacaagagatgcccattactgtgagggacccttgaagtctggactcttaaatgggtttttgctgatttcctgggtgcatgctaggatgatggggcttgatgcagtagggaagagacgatgtaaaaataataaacaatatataccttcaaaaaaaaaaaaaaaaaaaaaaaaa

SEQ ID NO: 774 - DNA, 3017 bp, Homo sapiens
gaatggtgtgtgctgtgctatccaggaacacatttattatcattatcaagtattgtgtactgtacagaatgatgtgtgctgtgctatccaggaacacatttattatcattatcaagtattgtgtactgtacagaatgatgtgcgctgtgctatccaggaacacatttattatcattatcaagtattgtgtactgtacagaatggtgtgcgctgtgctatccaggaacacatttattatcattatcaagtattgtgtactgtacagaatggtgtgcgctgtgctatccaggaacacatttattatcattatcaagtattgtgtactgtacagaatggtgtgcgctgtgctatccaggaacacatttattatcattatcaagtattgtgtactgtacagaatggtgtgcgctgtgcttttatgcaagtggcagcacagtagctttacacgagcatcactagacacatgagtagcattgcactcggcaacaggaattttttcaggcccattattataatcttatgggaccgcatcctatatgcagtttgtcattgaccaaaatgtccttatgcgatgcatgactatatttgcaaaggactagtatctagaatacatttaaaagtcttaaaatagtaacaaaacaaagaatgcaattagaacatgagcaaaagatacaaagcaacatttcactggagaagatatacagattgcaaataagcacatgaaaagatgtttgataccattagggaaacgcttctttaaaccaggagatatcaccacgtgttagaatcaacaaaataaggccaggcatggtggctcacacctgtaatcccaacactttgggaggctggggcaggcagatcacatgagatcaggaattcaagaccaacctggccaacatggcaaaaccctgtctctgctgaaaacacaaaaattagccaggtgtggtggcacacgcctgtagtcctagcaccttgggaggctgaggcaagataattgcttaaacccaggagacggaggttgcagtaagctgagatcatgccactgcgctccagcctgggcgacagagcaagattatgtctcaaaaaaaaaaaaaaaaaaaagaatcaccaaaataaaaaatagtaacaatactattgtcaaggatgcaaaggaactgtaccactcaatcactgctgtgagaatttaaagtggtgcagccactctgggaaacagcttggctgtttttttttatgactgaatgtgcaactactatatgatgcagtaatttcatttttgcacatttatcccggagaaatgaaaacatatattcacacaaaacctgtatatgaatgctaataaaagtcaattggccaggtgtggtggctcatgcctgtaatcccagcactttgggaggctgaggcagtggatcacctgaggtcaggagtttgagaccagcctggccaacgtggtgaaaactcgtctctactaaaaatacagcaattagctgggtgtaatagtagccacctgtaatcccagctactggggaggctgaagcagaagaacctcttgaacccgggaggcagaggttgcagtgagctgagatcgtaccactgcactccagcctgggcgatagagtgagactctgtctcaaaaaataaaataaaataaataaaaagattagataatctgcaaagttcctgtgagcgctgtcattttgtcactctggtttttcagattcttcccctggaggctggagtttccaggatgtcaagattacctctgcttgggtgagctatttcaagcagctgggatacctgtgtcactcctgctgtctgccagtgactgcccaggtgtctgctggttcctccccaggagtagggaggaaccaggtgggctggctgggatgggtggatatttaaagaccaggccttggacgctgcagcacttctatctctgcttgatgcctgctgccacgtggctggtcctcctcctcctgctgtggctgagccttggggtgaagacagctgctcccaaccccagaacctttgctgtcttgggacggatcaccgctgcaagaggggaagttgctactgtgatgaattctgccatgtggcaccagactgccacccagaccacagtgtcctctgcaaccccggtaactcacatacaggcccgattccacctacagcaaagctggatgcgatggctggcagaggcaaaccctttgcctgcactgcaggccaaagccgggatgtggcctagatggttcctaaggtccctgacaatcctgagatcttgcatcttgtctatttcaggtcaaaggtgcctacatgctccctctagctttgtttccctgatgttccttgccacctgctactcctctctgagctacttttccaggttccacagggagaggttcagctgtccgtggtagacatgagggtagagaatgaggtggttgggttccacttacctttctatcatcttgcagtatggatgtctcttgactggtaccgtgtagacttttgagggcacacaggagtctgcagagagatactggggacattgagcagcagcagtggggttgggaggcagaaatgaggacaggaacatttaccttgtgtttctctcagcttctcagatgaccaagatggtgctgcagatggtgctgaggatggagaacccaccaagccccgctaggagccacctagactggatgcagagcatggttcagcgagttctccaaaccagcctcccaggaatgccattcaccatggctgtgaggagaataaagaagagagcctgactcctctcctgaggccccttccccaccctgagccagcaggatccacggagcagaggtcatctgtccccagcttggcccactgaggccagcatggctgggcccaggatgcttgtctctcagctcccatcctgtgtacttccacattggtttaaccagaggaaaaccgaaatctacaattgtcataaacacatttaaatgtgcgtagaatcagccatacaaattgtgaaacat

SEQ ID NO: 775 - DNA, 1473 bp, Homo sapiens
aaattcctccggggtgaactctgagatagaaagttggcccgggaagctcaaggagggagagcggcagaggggaagactctgcaattctgcttgccccccaccccggcccaggcaagccaccctgcccccggcccccacctgcccgccccgcctgcccttcctcaccccggtgcctgcgggattgctggagagaacgcggcgatggagccgggcaggacccagataaagcttgaccccaggtacacagcagatcttctggaggtgctgaagaccaattacggcatcccctccgcctgcttctctcagcctcccacagcagcccaactcctgagagccctgggccctgtggaacttgccctcactagcatcctgaccttgctggcgctgggctccattgccatcttcctggaggatgccgtctacctgtacaagaacaccctttgccccatcaagaggcggactctgctctggaagagctcggcacccacggtggtgtctgtgctgtgctgctttggtctctggatccctcgttccctggtgctggtggaaatgaccatcacctcgttttatgccgtgtgcttttacctgctgatgctggtcatggtggaaggctttggggggaaggaggcagtgctgaggacgctgagggacaccccgatgatggtccacacaggcccctgctgctgctgctgcccctgctgtccacgtctgctgctcaccaggaagaagcttcagctgctgatgttgggccctttccaatacgccttcttgaagataacgctgaccctggtgggcctgtttctcatccccgacggcatctatgacccagcagacatttctgaggggagcacagctctatggatcaacactttcctcggcgtgtccacactgctggctctctggaccctgggcatcatttcccgtcaagccaggctacacctgggtgagcagaacatgggagccaaatttgctctgttccaggttctcctcatcctgactgccctacagccctccatcttctcagtcttggccaacggtgggcagattgcttgttcgcctccctattcctctaaaaccaggtctcaagtgatgaattgccacctcctcatactggagacttttctaatgactgtgctgacacgaatgtactaccgaaggaaagaccacaaggttgggtatgaaactttctcttctccagacctggacttgaacctcaaagcctaaggtggatggcttggacaatgaaaggatgctgtactcattagaatacaagattcctttactgtccctcaaccttgaccaaatgggaagcattcccccttgtcaacacaagctggcagatacatttgactctacagatgaaggtgaacaatgttaggataaaattgctttggatcttgcctggaaggtgttttaagttttgtaataaacaagatgatgtctgaaaatgtgtaaaaaaaaaaaaaaaaaaaa

1.-38. (canceled)

39. A method for classifying a subject having or suspected of having an inflammatory bowel disease as a responder or a non-responder to first line treatment, comprising measuring the gene expression in a biological sample obtained from the subject of one or more genes identified in any of Tables 4-8 to obtain a gene expression profile, and comparing the gene expression profile to that of a suitable control.

40. The method of claim 39, wherein the gene expression is determined by a technique selected from the group consisting of PCR, detection of the gene product, and hybridization to an oligonucleotide selected from the group consisting of DNA, RNA, cDNA, PNA, genomic DNA, and a synthetic oligonucleotide.

41. The method of claim 39, wherein the first line treatment is selected from the group consisting of 5-aminosalicylic acid (5-ASA) drugs, corticosteroids, methotrexate, and infliximab.

42. The method of claim 39, wherein a single gene is selected on the basis of being differentially expressed by at least 0.5 fold, or about 1.0 fold, or about 2 fold, or about 3 or about 4 or greater than about 5 fold as shown in any of Tables 4-8.

43. A method for identifying a responder or a non-responder to first line treatment for an inflammatory bowel disease in a subject having or suspecting of having the disease, comprising:
a) obtaining a biological sample from the subject;
b) isolating mRNA from the biological sample;
c) determining a gene expression profile from the biological sample comprising expression values for one or more genes listed in Tables 4-8; and
d) comparing the gene expression profile of the biological sample with a suitable control wherein a comparison of the gene expression profile and the control permits classification of the subject as a responder or a non-responder to the first line treatment for inflammatory bowel disease.

44. The method of claim 43, wherein the gene expression profile comprises at least 2, 5, 10, 15, 20, 25, 30, 35, 40, 45, 50, 60, 70, 80, 90, 100, 150, 200, 250 or more different polynucleotide probes, each different probe capable of hybridizing to a different gene sequence listed in Tables 4-8.

45. The method of claim 43, wherein the one or more genes are selected on the basis of having a fold-change of greater than about 2 or about 3, or about 4 or about 5 as shown in any of Tables 4, 5, 6, 7, or 8.

46. The method of claim 43, wherein the control is a reference gene expression profile selected from the group consisting of a known responder, a known non-responder, and a known refractory.

47. The method of claim 43, wherein the control is selected from one or more housekeeping genes or other gene determined to distinguishable in expression level compared to the same gene, wherein the gene expression values of the subject gene expression profile is determined relative to the control.

48. The method of claim 43, wherein the inflammatory bowel disease is Crohn's Disease.

49. The method of claim 43, wherein the biological sample is colon tissue.

50. The method of claim 43, wherein the biological sample is obtained at the time of diagnosis of the inflammatory bowel disease.

51. The method of claim 43, wherein the first line therapy is selected from the group consisting of 5-aminosalicylic acid (5-ASA) drugs, corticosteroids, methotrexate, 6-mercaptopurine/azathioprine (6-MP/AZA), and infliximab.

52. A gene expression system for identifying a responder or non-responder to first line treatment for an inflammatory bowel disease in a subject having or suspecting of having the disease, comprising a solid support having one or more oligonucleotides affixed to said solid support wherein the one or more nucleotides further comprises at least one sequence selected from those listed in Tables 4-8.

53. The gene expression system of claim 52, further comprising one or more normalization sequences.

54. The gene expression system of claim 52, wherein the inflammatory bowel disease is Crohn's disease or Ulcerative Colitis.

55. The gene expression system of claim 52, wherein the sequences are selected based on the fold change of gene expression in responders compared to non-responders, wherein the one or more genes selected from Tables 4-8 demonstrate a fold change of greater than about 2 or about 3 or about 4 or about 5 as shown in any of Tables 4-8.

56. The gene expression system of claim 52, wherein the solid support comprises an array selected from the group consisting of a chip array, a plate array, a bead array, a pin array, a membrane array, a solid surface array, a liquid array, an oligonucleotide array, a polynucleotide array, a cDNA array, a microfilter plate, and a membrane or a chip.
